(19) United States
(12) Patent Application Publication
(10) Pub. No.: US 2015/0354009 A1
(43) Pub. Date: Dec. 10, 2015

(54) COLORECTAL CANCER CLASSIFICATION WITH DIFFERENTIAL PROGNOSIS AND PERSONALIZED THERAPEUTIC RESPONSES

(71) Applicant: ECOLE POLYTECHNIQUE FEDERALE DE LAUSANNE (EPFL), Lausanne (CH)

(72) Inventors: Anguraj SADANANDAM, Tamilnadu, Pollachi (IN); Costas LYSSIOTIS, Boston, MA (US); Douglas HANAHAN, Lausanne (CH); Joe GRAY, Lake Oswego, OR (US)

(21) Appl. No.: 14/646,960

(22) PCT Filed: Nov. 26, 2013
(86) PCT No.: PCT/IB2013/060416

§ 371 Date: May 22, 2015

(30) Foreign Application Priority Data
Nov. 26, 2012 (IB) PCTIB2012056728

(51) Int. Cl. C12Q 1/68; G01N 33/574

(52) U.S. Cl. CPC C12Q 1/6886; G01N 33/57419; C12Q 2600/158; C12Q 2600/118; C12Q 2600/106; C12Q 2600/112

(57) ABSTRACT

The present invention relates to gene sets, the expression levels of which are useful for classifying colorectal tumors and predicting disease-free prognosis and response of patients to specific therapies that are either novel or currently available in the clinics for colorectal cancer patients.

### FIELD OF THE INVENTION

[0001] The present invention relates to gene sets, the expression levels of which are useful for classifying colorectal tumors and thereby predicting disease-free survival prognosis and response of patients to specific therapies that are either novel or currently available in the clinics for treating colorectal cancer patients.

### BACKGROUND OF THE INVENTION

[0002] Colorectal cancer (CRC) is a cancer arising from uncontrolled cell growth in the colon, rectum or in the appendix. Genetic analysis shows that colon and rectal tumors are essentially genetically the same type cancer. Symptoms of colorectal cancer typically include rectal bleeding, anemia which are sometimes associated with weight loss and changes in bowel habits. It typically starts in the lining of the bowel and if left untreated, can grow into the muscle layers underneath, and then through the bowel wall. Cancers that are confined within the wall of the colon are often curable with surgery while cancer that has spread widely around the body is usually not curable and management then focuses on extending the person's life via chemotherapy and improving quality of life.

[0003] Colorectal cancer is the third most commonly diagnosed cancer in the world, but it is more common in developed countries. Most colorectal cancer occurs due to lifestyle and increasing age with only a minority of cases associated with underlying genetic disorders. Greater than 75-95% of colon cancer occurs in people with no known inherited familial predisposition. Risk factors for the non-familial forms of CRC include advancing age, male gender, high fat diet, alcohol, obesity, smoking, and a lack of physical exercise.

[0004] Colorectal cancer is often found after symptoms appear, but most people with early colon or rectal cancer don't have symptoms of the disease. Symptoms usually only appear with more advanced disease. This is why screening is effective at decreasing the chance of dying from colorectal cancer and is recommended starting at the age of 50 and continuing until a person is 75 years old. Localized bowel cancer is usually diagnosed through sigmoidoscopy or colonoscopy.

[0005] Diagnosis of colorectal cancer is via tumor biopsy typically done during sigmoidoscopy or colonoscopy. The extent of the disease is then usually determined by a CT scan of the chest, abdomen and pelvis. There are other potential imaging test such as PET and MRI which may be used in certain cases. Colon cancer staging is done next and based on the TNM system which is determined by how much the initial tumor has spread, if and where lymph nodes are involved, and if and how many metastases there are.

[0006] Different types of treatment are available for patients with colorectal cancer. Four types of standard treatments are used: surgery, chemotherapy, radiation therapy and targeted therapy with the EGFR inhibitor cetuximab. While all can produce responses in patients with advanced disease, none are curative beyond surgery in early stage of disease. Notably, some patients demonstrate pre-existing resistance to certain of these therapies in particular to cetuximab or FOLFIRI therapy. Thus only a fraction of CRC patients respond well to therapy. As such, colorectal cancer continues to be a major cause of cancer mortality, and personalized treatment decisions based on patient and tumour characteristics are still needed.

### SUMMARY OF THE INVENTION

[0007] To solve the above-identified problem, Applicants classified colorectal cancer in to six subtypes based on the integrated analysis of genes expression profiles and cetuximab-based drug response. These subtypes are predictive of disease-free survival prognosis and response to selected therapies.

[0008] Thus in an embodiment, the present invention provides an in-vitro method for the prognosis of disease-free survival of a subject suffering from colorectal cancer or suspected of suffering therefrom and who has undergone a prior surgical resection of colorectal cancer, the method comprising
[0009] (i) providing a biological sample from said subject comprising colorectal cancer cells or suspected to comprise colorectal cancer cells;
[0010] (ii) measuring the expression level of one or a combination of genes selected from the group of genes listed in Table 2, and
[0011] (iii) classifying said biological sample as “Stem-like”, “Inflammatory”, “Transit-amplifying (TA)”, “Goblet-like” and “Enterocyte” on the basis of the gene expression profile according to Table 2, wherein
   [0012] “Stem-like” type of colorectal cancer indicates poor disease-free survival,
   [0013] “Inflammatory” type of colorectal cancer indicates intermediate disease-free survival,
   [0014] “Transit-amplifying (TA)” type of colorectal cancer indicates good disease-free survival,
   [0015] “Goblet-like” type of colorectal cancer indicates good disease-free survival, and
   [0016] “Enterocyte” type of colorectal cancer indicates intermediate disease-free survival.

[0017] The present invention further provides an in-vitro method for predicting the likelihood that a subject suffering from colorectal cancer or suspected of suffering therefrom and who has undergone a prior surgical resection of colorectal cancer will respond to therapies inhibiting or targeting EGFR, such as cetuximab, and/or cMET, the method comprising
[0018] (i) providing a biological sample from said subject comprising colorectal cancer cells or suspected to comprise colorectal cancer cells;
[0019] (ii) measuring the expression level of one or a combination of genes selected from the group of genes listed in Table 2, and
[0020] (iii) classifying said biological sample as “Stem-like”, “Inflammatory”, “Transit-amplifying (TA)”, “Goblet-like” and “Enterocyte” on the basis of the gene expression profile according to Table 2, wherein
   [0021] high expressions of AREG and EREG genes and low expressions of BHLHE41, FLNA and PLEKHB1 genes in “Transit-amplifying (TA)” type indicates that at metastatic setting said subject will be responsive to cetuximab treatment and resistant to cMET inhibitor therapy and this signature defines a subtype of TA type designed as “Cetuximab-sensitive transit-amplifying subtype (CS-TA)”.
   [0022] low expressions of AREG and EREG genes and high expressions of BHLHE41, FLNA and PLEKHB1 genes in “Transit-amplifying (TA)” type indicates that at metastatic setting said subject will be resistant to cetuximab treatment and will be responsive to cMET inhibitor therapy, and this signature defines a second subtype of TA type named as “Cetuximab-resistant transit-amplifying subtype (CR-TA)”.

[0023] The present invention also provides an in-vitro method for predicting the likelihood that a subject suffering from colorectal cancer or suspected of suffering therefrom and who has undergone a prior surgical resection of colorectal cancer will respond to cytotoxic chemotherapies such as FOLFIRI, the method comprising
[0024] (i) providing a biological sample from said subject comprising colorectal cancer cells or suspected to comprise colorectal cancer cells;
[0025] (ii) measuring the expression level of one or a combination of genes selected from the group of genes listed in Table 2, and
[0026] (iii) classifying said biological sample as “Stem-like”, “Inflammatory”, “Transit-amplifying (TA)”, “Goblet-like” and “Enterocyte” on the basis of the gene expression profile according to Table 2,
   wherein
[0027] “Stem-like” type of colorectal cancer predicts good response in both adjuvant and metastatic settings,
[0028] “Inflammatory” type of colorectal cancer predicts good response in adjuvant setting,
[0029] “TA (transit-amplifying)” type of colorectal cancer predicts poor response in both adjuvant and metastatic settings,
[0030] “Goblet-like” type of colorectal cancer predicts poor response in adjuvant setting, and
[0031] “Enterocyte” type of colorectal cancer predicts good response in adjuvant setting.

### BRIEF DESCRIPTION OF THE FIGURES

[0032] FIG. 1 shows Classification of colorectal tumors and cell lines and their prognostic significance. CRC subtypes were identified in A) tumors (from two combined datasets: core dataset, GSE13294 and GSE14333) and B) cell lines. C) Differential disease-free survival among the CRC subtypes for patient tumors from the GSE14333 dataset are plotted as Kaplan-Meier Survival curves. D) Heatmap depicting known MSI or MSS status for each of the patient colorectal tumor subtype samples from the dataset GSE13294.

[0033] FIG. 2 shows Cellular phenotype and Wnt signaling in the CRC subtypes. Prediction of A) colon-crypt location (top or base) and B) Wnt activity in patient colorectal tumors by applying specific signatures and using the NTP algorithm. C) TOP-flash assay depicting Wnt activity in colorectal cancer cell lines. D) Quantitative (q)RT-PCR analysis showing the average expression of stem cell and E) differentiation-specific markers in CRC subtype cell lines (HT29 and LS174T from goblet-like; LS1034, NCI-H508 and SW948 from TA; and SW48, HCT8 and SW620 from stem-like subtypes). The qRT-PCR data is plotted relative to the house keeping gene RPL13A. Error bars represent standard error of mean (SEM, for biological triplicates). Immunofluorescent analysis of the differentiation markers F) KRT20 and G) MUC2 are presented in red, and nuclei are counter-stained with DAPI (blue). Cell lines a) HCT116 and b) colo320 belong to the stem-like; c) SW1417 and d) SW948 belong to TA; and e) HT29 and f) LS174T belong to goblet-like subtype.

[0034] FIG. 3 shows Differential drug sensitivity among CRC subtypes. A) Individual CRC metastatic patient response to cetuximab treatment and its association with subtypes. B) Cetuximab response in CRC subtype-specific cell lines are plotted as percent proliferation of cells treated with 3.4 μg cetuximab, and normalized to vehicle-treated cells in a) bar plot and b) boxplot (sensitive versus resistant cell lines). Asterisk (*) represents p-value, as calculated using student t test (p=0.0002). Error bars represent SEM for technical triplicates. C) Heatmap depicting differential gene expression patterns and the KRAS mutation status among TA subtype CRC patient samples that responded (R; complete, partial response and stable disease were considered as response) to cetuximab versus those that did not respond (NR). D) Kaplan-Meier curve of differential survival based on FLNA expression in TA subtype samples. E) Differential response to the cMet inhibitor PHA-665752 (125 nM) in CR-TA and CS-TA subtype-specific cell lines, plotted relative to vehicle-treated cells as a) bar plot and b) boxplot. c) Differential response to cetuximab in CR-TA and CS-TA subtype-specific cell lines relative to vehicle-treated cells. Asterisk (*) represents p-value as calculated using student t test (p=0.04). Error bars represent SEM for technical triplicates. G) Prediction of individual patient colorectal tumor response to FOLFIRI by applying published FOLFIRI response signatures to the core dataset.

[0035] FIG. 4 shows Summary of the A) characteristics of each of the CRC subtypes and B) CRC subtype phenotype based on colon-crypt location. UP—unpredicted and ND—not done.

[0036] FIG. 5 shows Mapping the cellular phenotypes of each subtype. A) Goblet specific markers (MUC2 and TFF3) show high median expression only in CRC goblet-like subtype; B) enterocyte markers' (CA1, CA2, KRT20, SLC26A3, AQP8 and MS4A12) show high median expression only in CRC enterocyte subtype; C) Wnt target genes (SFRP2 and SFRP4), D) myoepithelial genes (FN1 and TAGLN) and E) epithelial-mesenchymal (EMT) markers (ZEB1, ZEB2, TWIST1 and SNAI2) show high median expression only in CRC stem-like subtype; and F) chemokine and interferon-related genes (CXCL9, CXCL10, CXCL11, CXCL13, IFIT3) show high median expression only in CRC inflammatory subtype. The gene expression data are presented as the median of median-centered data from DWD merged CRC core microarray datasets.

[0037] FIG. 6 shows Subtypes in CRC cell lines and subtype-specific gene expression in CRC xenograft tumors. A) NMF consensus clustering analysis and cophenetic coefficient for cluster k=2 to k=5 from combining CRC cell line datasets with the core primary tumor datasets; the maximum cophenetic coefficient occurred for k=5. However, CRC cell lines representing only 4 of the 5 subtypes were identified; no cell line for the enterocyte subtype was found. The cell lines dataset is presented after CRCassigner genes had been mapped. B) Heatmap showing CRC subtypes represented amongst a set of CRC cell lines as identified by merging core tumor dataset and cell lines as in FIG. 1B. C) Quantitative (q)RT-PCR analysis of SW1116 cell line using stem cell and differentiated markers. D-E) qRT-PCR analysis of xenograft tumors derived from the cell lines HCT116 (stem-like subtype), COLO205 (TA subtype) and HT29 (goblet-like subtype) for D) differentiated and E) stem cell markers. The expression is relative to the house-keeping gene, RPL13A. Error bars represent standard deviation (SD; technical triplicates).

[0038] FIG. 7 shows DFS comparison of CRC subtypes versus MSI/MSS. A-C) Kaplan-Meier Survival curve depicting differential survival for dataset GSE14333, which A) includes both treated (adjuvant chemotherapy and/or radiation therapy) and untreated samples, B) only treated samples and C) treated and untreated samples only from stem-like subtype. D) Predicted MSI status for core dataset (GSE13294 and GSE14333) samples using publicly available gene signatures with the NTP algorithm. Predicted MSI status with FDR<0.2 or no FDR cutoff are shown. E) Kaplan-Meier Survival curve depicting differential DFS for samples from dataset GSE14333 that were predicted to be MSI or MSS.

[0039] FIG. 8 shows Differential Wnt target gene expression in two different sub-populations of TA subtype tumor samples. Bar graph showing median of median centered gene expression of the Wnt signaling targets LGR5 and ASCL2 in the core CRC microarray data for TA subtype tumors that are either predicted to be crypt top- or base-like.

[0040] FIG. 9 shows Cetuximab response and progression free survival (PFS) in subtype-specific CRC tumors and cell lines. A) NMF consensus clustering analysis and cophenetic coefficient for cluster k=2 to k=5 of Khambata-Ford dataset. The dataset is presented after PAM colorectal subtype-specific genes had been mapped. B) Heatmap showing subtypes in GSE28722 (n=125) samples and their associated metastasis information. C) Cetuximab response in cell lines from different CRC subtypes. Data are normalized to vehicle-treatment. Kaplan-Meier Survival curve for patients (Khambata-Ford dataset) that are responsive (R) or non-responsive (NR) to cetuximab based on: D) only TA subtype samples; E) only KRAS wild type samples; F) all samples except those from the TA subtype and unknown (liver contamination); and G) all samples except those that are unknown. H) Differential expression of AREG and EREG gene predictors between R and NR, as measured by qRT-PCR analysis (data from Khambata, et al). I) qRT-PCR data showing fold change in FLNA expression. Gene expression was normalized to the house-keeping gene, RPL13A. The NCI-H508 is presented as a control. Kaplan-Meier Survival curve (Khambata-Ford dataset) comparing FLNA expression in J) all samples, K) KRAS wild-type samples or L) KRAS mutant samples.

[0041] FIG. 10 shows Subtype-specific FOLFIRI response. Association of response to FOLFIRI in individual patient samples from the datasets—A) GSE14333 and B) GSE13294 by applying specific signatures using the NTP algorithm.

[0042] FIG. 11 shows immunohistochemistry markers for TA subtype, Enterocyte subtype, Goblet-like subtype and Stem-like subtype.

[0043] FIG. 12 shows heatmap showing CRCassigner-30 gene signatures.

[0044] FIG. 13 shows cetuximab response in transit-amplifying sub-type-specific xenograft tumors using the CS-TA cell lines NCl-H508 (A), SW1116 (B) and CR-TA cell lines LS1034 (C), SW948 (D).

[0045] FIG. 14 shows specific response to chemotherapy in CRC subtypes. (A) heatmap showing individual responses of patients with primary CRC (Del Rio data set, n=21) to FOLFIRI treatment and their association with subtypes. Complete and partial responses and stable disease were considered as beneficial response, whereas progressive disease was deemed as no response. (B) heatmap showing association of individual patient CRC responses in the Khambata-Ford data set (metastasis) to FOLFIRI by applying published FOLFIRI response signatures using the NTP algorithm. In these analysis, statistics include only those samples that were predicted with FDR<0.2. (D) CRC subtype-specific cell line response to FOLFIRI components. Namely, the combination of 5-FU (239 μM) and irinotecan (22.5 μM), plotted as percentage cellular proliferation and normalized to vehicle-treated cells. Error bars represent the s.d. of technical replicates from a representative experiment.

[0046] FIG. 15 shows subtype guided therapeutic strategies suggested by the association studies.

### DETAILED DESCRIPTION OF THE INVENTION

[0047] Although methods and materials similar or equivalent to those described herein can be used in the practice or testing of the present invention, suitable methods and materials are described below. All publications, patent applications, patents, and other references mentioned herein are incorporated by reference in their entirety. The publications and applications discussed herein are provided solely for their disclosure prior to the filing date of the present application. Nothing herein is to be construed as an admission that the present invention is not entitled to antedate such publication by virtue of prior invention. In addition, the materials, methods, and examples are illustrative only and are not intended to be limiting.

[0048] In the case of conflict, the present specification, including definitions, will control. Unless defined otherwise, all technical and scientific terms used herein have the same meaning as is commonly understood by one of skill in art to which the subject matter herein belongs. As used herein, the following definitions are supplied in order to facilitate the understanding of the present invention.

[0049] As herein used, “a” or “an” means “at least one” or “one or more.”

[0050] The term “comprise” is generally used in the sense of include, that is to say permitting the presence of one or more features or components.

[0051] The term “disease-free survival (DFS)” in generally means the length of time after primary treatment for a cancer ends that the patient survives without any signs or symptoms of that cancer. In the context of the present invention, the primary treatment is preferably surgical resection of colorectal cancer. In a clinical trial, measuring the disease-free survival is one way to see how well a new treatment works.

[0052] “Adjuvant setting” as used herein refers to adjuvant treatment to surgical resection of colorectal cancer, whereas “metastatic setting” refers to treatment used in colorectal cancer recurrence (when colorectal cancer comes back) after surgical resection of colorectal cancer and after a period of time during which the colorectal cancer cannot be detected.

[0053] The terms “level of expression” or “expression level” in general are used interchangeably and generally refer to the amount of a polynucleotide or an amino acid product or protein in a biological sample. “Expression” generally refers to the process by which gene-encoded information is converted into the structures present and operating in the cell. Therefore, as used herein, “expression” of a gene may refer to transcription into a polynucleotide, translation into a protein, or even posttranslational modification of the protein. Fragments of the transcribed polynucleotide, the translated protein, or the post-translationally modified protein shall also be regarded as expressed whether they originate from a transcript generated by alternative splicing or a degraded transcript, or from a posttranslational processing of the protein, e.g., by proteolysis. “Expressed genes” include those that are transcribed into a polynucleotide as mRNA and then translated into a protein, and also those that are transcribed into RNA but not translated into a protein (for example, transfer and ribosomal RNAs).

[0054] As used herein the terms “subject” or “patient” are well-recognized in the art, and, are used interchangeably herein to refer to a mammal, including dog, cat, rat, mouse, monkey, cow, horse, goat, sheep, pig, camel, and, most preferably, a human. In some embodiments, the subject is a subject in need of treatment or a subject with a disease or disorder, such as colorectal cancer. However, in other embodiments, the subject can be a normal “healthy” subject or a subject who has already undergone a treatment, such as for example a prior surgical resection of colorectal cancer. The term does not denote a particular age or sex. Thus, adult and newborn subjects, whether male or female, are intended to be covered.

[0055] Applicants used non-matrix factorization (NMF) based consensus-based unsupervised clustering of CRC gene expression profiles from 1049 patient samples overlaid with corresponding response data to an epidermal growth factor receptor (EGFR)-targeted drug (cetuximab; clinically available) to identify six clinically relevant subtypes of CRC. These subtypes exhibit differential patterns of gene expression (CRC assigner signature) and associate with chemotherapy response and disease-free survival. Surprisingly, these subtypes appear to transcend the microsatellite stable (MSS/MSI) status traditionally used to subtype CRC in terms of predicting response to therapy. Interestingly, these subtypes have phenotypes similar to various normal cell types within the colon-crypt and exhibit differential degrees of stemness. In addition, CRC assigner signatures classified human CRC cell lines and xenograft tumors into four of the five CRC subtypes, which can now better serve as surrogates to analyze drug responsiveness and other parameters of CRC tumor subtypes. Recognizing these subtypes, their apparent cellular phenotypes, and their differential responses to therapy may guide the development of pathway- and mechanism-based therapeutic strategies targeted at specific subtypes of CRC tumors.

[0056] Seeking to extend and generalize these findings for CRC, and in particular as a step towards a more specific predictive clinical classification system for CRC, Applicants used consensus-based non-negative matrix factorization (NMF) to cluster two published gene expression datasests (after merging them using the distance weighted discrimination—DWD—method) derived from resected, primary CRC (core dataset, n=445). This approach revealed five distinct molecular genetic subtypes of CRC, with each of the five subtypes exhibiting a high degree of consensus. Because expression profiles obtained from the pooled data were envisioned to be used for identification of gene signatures (and marker gene components thereof) of putative subtypes, silhouette width (a measure of goodness of cluster validation that identifies samples that are the most representative of the subtypes and belong to their own subtype than to any other subtypes) was used to exclude samples situated on the periphery of the five CRC subtype clusters, yielding a ‘core’ set of 387 CRC samples. To identify markers associated with the 5 subtypes, Applicants used two algorithms—Significance Analysis of Microarrays (SAM, false discovery rate, FDR=0), followed by Prediction Analysis for Microarrays (PAM)—to identify 786 subtype-specific signature genes.

[0057] More specifically in order to detect multiple subtypes (some of which may represent relatively small fractions of the patient population), the clustering methods require moderately large numbers of samples—more than contained in any one of the individual CRC datasets published to date. With that in mind, Applicants began our analysis by identifying suitable and comparable microarray datasets (see Table 1) and selecting only those datasets that were described in Dalerba, et al, Nature biotechnology 29, 1120-1127 (2011), as not having redundant samples.

TABLE 1
Datasets

| | Number of | |
|---|---|---|
| Dataset | samples | Nature of samples |
| GSE13294 | 155 | Whole tumor |
| GSE14333 | 290 | Whole tumor |
| GSE12945 | 62 | Microdissected |
| GSE16125 | 48 | Whole tumor |
| GSE20916 | 101 | only tumor samples - removed |
| | | normal samples |
| GSE20842 | 65 | Whole tumor |
| GSE21510 | 123 | Laser capture microdissected and |
| | | whole tumor. Normal samples |
| | | removed |
| GSE5851 | 80 | Liver metastases from CRC |
| (Khambata-Ford dataset) | | |
| TCGA dataset | 220 | Whole tumor |
| Rio dataset | 21 | whole tumor |
| GSE28722 | 125 | whole tumor |

[0058] Once the datasets were selected, the raw gene expression readouts were either normalized using robust multiarray averaging (RMA) or obtained as processed data from the Applicants, and then pooled using distance weighted discrimination (DWD) after normalizing each dataset to N(0,1). Consensus-based non-negative matrix factorization (NMF) was applied to the pooled data to cluster the samples into the initial set of three and then five CRC subtypes. Although NMF based consensus-based clustering algorithms can be used to detect robust clusters (i.e. clusters that tolerate a moderate degree of outlier contamination in the training set), the identification of genes (or markers) specific to each cluster is somewhat more sensitive to samples representing rare subtypes or samples of indeterminate origin. Therefore, once the clusters (subtypes) were identified using NMF, Applicants used silhouette width to screen out those samples residing on the periphery of the NMF-identified clusters. From there, Applicants applied well-established methods (Significance Analysis of Microarrays; SAM and Prediction Analysis for Microarrays; PAM) to extract biomarkers associated with the screened subtypes.

[0059] Pooling Datasets Using DWD.

[0060] When pooling microarray data, one of the main challenges is to pool the microarray datasets in such a way as to compensate for systematic biases (e.g. batch effects) without distorting or collapsing biologically informative and subtype-discriminating structures in the gene expression space. In this respect, a method known as distance weighted discrimination (DWD) was used to pool microarray data and showed that DWD demonstrates superior pooling characteristics when compared to alternative methods such as singular value decomposition (SVD) and Fisher linear discrimination, especially for high-throughput gene expression data in which Applicants must contend with small numbers of samples relative to the number of gene expression readouts (i.e. a high dimensional features space). As a variation on the support vector machine (SVM) approach, DWD is suitable for high dimensional features spaces, but it has the added benefit of minimizing the effects that data artifacts and outliers can have on the batch effect adjustments.

[0061] Unsupervised Clustering Using Consensus-Based NMF—

[0062] By itself, non-negative matrix factorization is a dimensionality reduction method in which Applicants can attempt to capture the salient functional properties of a high-dimensional gene expression profile using a relatively small number of “metagenes” (defined to be non-negative linear combinations of the expression of individual genes—i.e. a weighted average of gene expression, with each metagene having its own set of weighting coefficients). As with principal component analysis, the familiar gene expression table (samples×genes) is factored into two lower-dimensional matrices except that for NMF the matrix factors are constrained to be purely non-negative values. This ‘non-negativity’ constraint is believed to more realistically represent the nature of gene expression, in that gene expression is either zero- or positive-valued. In contrast, PCA matrix factors can be either positive- or negative-valued.

[0063] Given an arbitrary gene expression table (profile), it is not generally possible to analytically factor the table into two matrix factors. As a consequence, numerical algorithms have been developed to accomplish this by first initializing the two matrices to random values and then iteratively updating the matrices using a search algorithm. There is no guarantee that this search algorithm will converge to a globally optimal factorization, hence one re-runs the algorithm using multiple random initial conditions to see whether the algorithm provides a consistent consistent factorization. At the end of the factorization algorithm, one obtains two lower-dimensional matrices, which when multiplied together will yield an approximation to the original gene expression table. The metagenes correspond to functional properties represented in the original gene expression table and can be viewed as ‘anchors’ for clustering the samples into subtypes. Specifically, each sample is assigned to a subtype by finding which metagene is most closely aligned with the sample's gene expression profile. Hence each sample is assigned to one and only one cluster.

[0064] As explained above, the robustness of clustering can be gauged by repeating the factorization process several times using different random initial conditions for the factorization algorithm. If the factorization is insensitive to the initial conditions of the search algorithm, then any pair of samples will tend to co-cluster irrespective of the initial condition.

[0065] In the NMF consensus analysis of the core dataset, Applicants found good consensus for both k=3 and k=5 clusters, suggesting that there was evidence for 5 consensus clusters and hence 5 functional properties in the core dataset

[0066] Removing Outliers Using Silhouette Width—

[0067] For the purposes of identifying subtype-specific markers, the analysis includes only those samples that are statistically belonging to the core of each of the clusters. Excluding samples with negative silhouette width has been shown minimize the impact of sample outliers on the identification of subtype markers. Accordingly, 58 samples from the original 445 samples dataset were identified as having negative silhouette width and were therefore excluded from the marker identification phase of the analysis.

[0068] Identification of Subtype-Specific Biomarkers Using SAM and PAM—

[0069] Applicants used a two-step process to identify subtype-specific biomarkers. The first step, identifies the differentially expressed genes and the second step finds subsets of these genes that are associated with specific subtypes. For the first step, Applicants used significance analysis of microarrays (SAM) to identify genes significantly differentially expressed across the 5 subtypes. This is a well established method that looks for large differential gene expression relative to the spread of expression across all genes. Sample permutation is used to estimate false discovery rates (FDR) associated with sets of genes identified as differentially expressed. By adjusting a sensitivity threshold, Δ_{SAM}, users can control the estimated FDR associated with the gene sets. the gene sets. For the analysis, Applicants selected Δ_{SAM}=12.2, which yielded 786 differentially expressed genes and an FDR of zero. The second step in the process was to match the differentially expressed genes to specific subtypes. For this step, Applicants used the prediction analysis of microarrays (PAM), which is similar in nature to the centroid method recently applied by the TCGA consortium to glioblastoma data, except that PAM eliminates the contribution of genes that differentially express below a specific threshold, Δ_{PAM}, relative to the subtype-specific centroids. Threshold scales, Δ_{PAM}=2 was chosen after evaluating various Δ_{PAM} values and misclassification errors. Leave out cross validation (LOCV) analysis was then performed to identify a set of genes that had the lowest prediction error. Applicants identified all of the 786 SAM selected genes that had the lowest prediction error of about 7% after PAM and LOCV analysis. The resulting subtype-specific markers (CRCassigner) are listed in Table 2.

[0070] Based on genes preferentially expressed in the each subtype, Applicants named the five CRC subtypes:
[0071] (1) goblet-like (high mRNA expression of goblet-specific MUC2 and TFF3),
[0072] (2) enterocyte (high expression of enterocyte-specific genes),
[0073] (3) stem-like (high expression of Wnt signaling targets and myoepithelial/mesenchymal genes and low expression of differentiated markers),
[0074] (4) inflammatory (high expression of chemokines and interferon-related genes, see FIG. 5), and
[0075] (5) transit-amplifying (TA; heterogeneous samples either expressing high or low Wnt-target genes, as described below).

TABLE 2
Subtype specific genes and their scores as analyzed by Prediction Analysis
of Microarray(PAM); The scores are illustrative only and represent expression
profiles (tendencies) of listed genes. Positive score means high expression,
negative score means low expression and zero means no change in expression;
Threshold used for PAM analysis was 2

| | SEQ ID | | | | | |
|---|---|---|---|---|---|---|
| Genes | NO: | Inflammatory | Goblet-like | Enterocyte | TA | Stem-like |
| SFRP2 | 1 | 0 | −0.2776 | 0 | −0.2306 | 0.879 |
| MGP | 2 | 0 | −0.1888 | 0 | −0.1475 | 0.7035 |
| COL10A1 | 3 | 0 | −0.1584 | −0.1232 | −0.1319 | 0.6845 |
| MSRB3 | 4 | 0 | −0.1956 | 0 | −0.1123 | 0.6763 |
| CYP1B1 | 5 | 0 | −0.0152 | −0.1274 | −0.1626 | 0.6511 |
| FNDC1 | 6 | 0 | −0.1582 | −0.0326 | −0.0494 | 0.6486 |
| SFRP4 | 7 | 0 | −0.0988 | −0.133 | 0 | 0.647 |
| GAS1 | 8 | 0.0412 | −0.15 | −0.0838 | −0.2186 | 0.6455 |
| CCDC80 | 9 | 0 | −0.1613 | 0 | −0.1424 | 0.6364 |
| SPOCK1 | 10 | 0 | −0.152 | −0.0326 | −0.1235 | 0.6318 |
| THBS2 | 11 | 0 | −0.1923 | −0.148 | −0.0586 | 0.6214 |
| MFAP5 | 12 | 0 | −0.1392 | 0 | −0.0635 | 0.6137 |
| ASPN | 13 | 0 | −0.151 | −0.0018 | −0.0499 | 0.6115 |
| TNS1 | 14 | 0 | −0.2049 | 0 | −0.1083 | 0.6071 |
| TAGLN | 15 | 0 | −0.1607 | 0 | −0.1298 | 0.6043 |
| COMP | 16 | 0 | 0 | −0.1835 | 0 | 0.5813 |
| NTM | 17 | 0 | −0.1099 | −0.119 | −0.0708 | 0.5714 |
| HOPX | 18 | 0 | −0.1438 | −0.0138 | −0.135 | 0.5637 |
| AEBP1 | 19 | 0 | −0.0861 | −0.0086 | −0.1081 | 0.5552 |
| FRMD6 | 20 | 0 | −0.1576 | 0 | −0.168 | 0.5545 |
| PLN | 21 | 0 | −0.1089 | 0 | −0.1183 | 0.5532 |
| FBN1 | 22 | 0 | −0.149 | 0 | −0.1139 | 0.5529 |
| COL11A1 | 23 | 0 | −0.1542 | −0.2209 | −0.026 | 0.5523 |
| ANTXR1 | 24 | 0 | −0.1075 | 0 | −0.0794 | 0.5469 |
| MIR100HG | 25 | 0 | −0.0574 | 0 | −0.0351 | 0.543 |
| PCDH7 | 26 | 0 | −0.0985 | 0 | −0.0669 | 0.5417 |
| DDR2 | 27 | 0 | −0.1251 | 0 | −0.1375 | 0.5383 |
| MYL9 | 28 | 0 | −0.2042 | 0 | 0 | 0.5359 |
| FERMT2 | 29 | 0 | −0.1167 | 0 | −0.0515 | 0.5291 |
| VCAN | 30 | 0 | −0.0782 | 0 | −0.0715 | 0.5162 |
| CDH11 | 31 | 0 | 0 | 0 | −0.0454 | 0.5127 |
| SYNPO2 | 32 | −0.0719 | −0.1083 | 0 | −0.0712 | 0.5068 |
| SULF1 | 33 | 0 | −0.2186 | 0 | −0.0949 | 0.5062 |
| FAP | 34 | 0 | −0.0265 | −0.0647 | −0.1393 | 0.5032 |
| COL3A1 | 35 | 0 | −0.0794 | −0.0304 | −0.1117 | 0.5029 |
| CTHRC1 | 36 | 0 | −0.1881 | −0.0265 | −0.0779 | 0.5023 |
| ADAM12 | 37 | 0 | −0.0799 | −0.1009 | −0.1043 | 0.5004 |
| COL1A2 | 38 | 0 | −0.079 | 0 | −0.0861 | 0.5003 |
| TIMP2 | 39 | 0 | −0.1207 | 0 | −0.1334 | 0.4964 |
| PRRX1 | 40 | 0.0088 | −0.117 | −0.0297 | −0.1347 | 0.4919 |
| BGN | 41 | 0 | −0.1115 | −0.0389 | −0.0659 | 0.4905 |
| GLT8D2 | 42 | 0 | −0.0607 | 0 | −0.0853 | 0.4893 |
| DCN | 43 | 0 | −0.1514 | 0 | −0.1093 | 0.4874 |
| FABP4 | 44 | 0 | −0.0096 | 0 | −0.0303 | 0.4815 |
| FBLN1 | 45 | 0 | −0.1223 | 0 | −0.0202 | 0.4789 |
| EFEMP1 | 46 | 0 | −0.105 | 0 | −0.0602 | 0.4771 |
| VGLL3 | 47 | 0 | −0.0853 | −0.0418 | −0.0742 | 0.4769 |
| SPARC | 48 | 0 | −0.1186 | 0 | −0.0553 | 0.4726 |
| ITGBL1 | 49 | 0 | −0.0379 | −0.1163 | 0 | 0.4715 |
| AKAP12 | 50 | 0 | −0.1005 | 0 | −0.0313 | 0.4705 |
| INHBA | 51 | 0 | −0.0115 | −0.0995 | −0.0605 | 0.4705 |
| COL5A2 | 52 | 0 | −0.1055 | −0.031 | −0.0409 | 0.4672 |
| RAB31 | 53 | 0.0435 | −0.1527 | 0 | −0.2026 | 0.4666 |
| ISLR | 54 | 0 | −0.1724 | 0 | 0 | 0.4604 |
| STON1 | 55 | 0 | −0.0541 | 0 | 0 | 0.4559 |
| NOX4 | 56 | 0 | −0.0082 | −0.1679 | −0.0011 | 0.4553 |
| LOX | 57 | 0.0199 | −0.1362 | 0 | −0.1302 | 0.451 |
| POSTN | 58 | 0.0134 | −0.1739 | 0 | −0.1652 | 0.4507 |
| ECM2 | 59 | 0 | 0 | −0.1134 | 0 | 0.4489 |
| LHFP | 60 | 0 | −0.0428 | 0 | −0.0242 | 0.4474 |
| SERPINF1 | 61 | 0 | −0.0925 | 0 | −0.0896 | 0.4419 |
| NNMT | 62 | 0 | 0 | 0 | −0.2092 | 0.4393 |
| PTGIS | 63 | 0 | −0.045 | 0 | 0 | 0.4345 |
| MYLK | 64 | 0 | −0.1502 | 0 | −0.0126 | 0.4325 |
| MAP1B | 65 | 0 | 0 | 0 | 0 | 0.4315 |
| CALD1 | 66 | 0 | −0.0892 | 0 | −0.045 | 0.4304 |
| GREM1 | 67 | 0 | −0.1838 | 0 | −0.2011 | 0.4289 |
| COL5A1 | 68 | 0 | −0.0193 | 0 | −0.0705 | 0.4235 |
| CNN1 | 69 | 0 | −0.0372 | 0 | −0.0098 | 0.4179 |
| TIMP3 | 70 | 0 | −0.3013 | 0 | 0 | 0.4153 |
| COL6A2 | 71 | 0 | −0.0842 | 0 | −0.1669 | 0.4137 |
| ZEB1 | 72 | 0 | −0.0686 | 0 | 0 | 0.4121 |
| PPAPDC1A | 73 | 0 | 0 | −0.1524 | 0 | 0.408 |
| OLFML2B | 74 | 0 | −0.0094 | −0.0578 | −0.0358 | 0.406 |
| HTRA1 | 75 | 0 | 0 | 0 | −0.0049 | 0.4052 |
| CXCL12 | 76 | 0 | −0.066 | 0 | −0.0859 | 0.4029 |
| DPYSL3 | 77 | 0 | 0 | −0.1132 | 0 | 0.4021 |
| PDGFC | 78 | 0 | 0 | 0 | −0.0277 | 0.401 |
| COL6A3 | 79 | 0 | −0.1016 | 0 | −0.0802 | 0.4004 |
| COL1A1 | 80 | 0 | −0.1083 | 0 | −0.0322 | 0.3978 |
| MYH11 | 81 | −0.0744 | −0.0394 | 0 | 0 | 0.3941 |
| AOC3 | 82 | 0 | −0.041 | 0 | −0.0664 | 0.3934 |
| SPARCL1 | 83 | 0 | −0.0965 | 0 | −0.1647 | 0.3929 |
| COL12A1 | 84 | 0 | 0 | 0 | −0.0187 | 0.3927 |
| GPNMB | 85 | 0.2398 | −0.1173 | 0 | −0.2938 | 0.3894 |
| BCAT1 | 86 | 0.1813 | −0.1075 | −0.1043 | −0.1465 | 0.3875 |
| PHLDB2 | 87 | 0 | 0 | 0 | −0.1801 | 0.3844 |
| SERPING1 | 88 | 0.1257 | −0.1389 | 0 | −0.2161 | 0.3804 |
| TPM2 | 89 | 0 | −0.1117 | 0 | 0 | 0.3803 |
| TGFB1I1 | 90 | 0 | 0 | 0 | −0.0126 | 0.3768 |
| MITF | 91 | 0 | 0 | 0 | −0.1126 | 0.3768 |
| GPC6 | 92 | 0 | −0.1114 | 0 | −0.055 | 0.3739 |
| NEXN | 93 | 0.0814 | −0.164 | 0 | −0.1467 | 0.3736 |
| MMP2 | 94 | 0 | −0.0197 | 0 | −0.0948 | 0.3709 |
| FAM129A | 95 | 0.1134 | −0.1219 | 0 | −0.2347 | 0.3671 |
| ADAMTS2 | 96 | 0.0641 | −0.1371 | 0 | −0.1016 | 0.3646 |
| FIBIN | 97 | 0 | 0 | −0.0298 | 0 | 0.3634 |
| TMEM47 | 98 | 0 | −0.1286 | 0 | 0 | 0.3621 |
| IGFBP5 | 99 | 0 | −0.2048 | 0 | −0.0485 | 0.3611 |
| TNFAIP6 | 100 | 0.2379 | −0.1454 | −0.0983 | −0.149 | 0.3595 |
| MXRA5 | 101 | 0 | −0.0162 | −0.0296 | −0.001 | 0.3594 |
| ARL4C | 102 | 0.1305 | −0.0848 | −0.0129 | −0.1572 | 0.359 |
| EPYC | 103 | 0 | 0 | −0.0864 | 0 | 0.3551 |
| COL15A1 | 104 | 0 | −0.0768 | 0 | −0.147 | 0.3536 |
| LMOD1 | 105 | 0 | 0 | 0 | 0 | 0.351 |
| FN1 | 106 | 0 | −0.1868 | −0.062 | 0 | 0.351 |
| DPT | 107 | 0 | −0.016 | 0 | 0 | 0.3467 |
| GNB4 | 108 | 0.159 | −0.158 | 0 | −0.1867 | 0.3441 |
| TWIST1 | 109 | 0 | −0.0276 | 0 | 0 | 0.3422 |
| SDC2 | 110 | 0 | −0.0673 | 0 | 0 | 0.3405 |
| FLRT2 | 111 | 0 | −0.0275 | 0 | 0 | 0.3377 |
| LOXL1 | 112 | 0 | 0 | −0.0073 | −0.0971 | 0.3372 |
| FHL1 | 113 | −0.1256 | 0 | 0 | −0.0116 | 0.3365 |
| MAB21L2 | 114 | 0 | −0.0568 | 0 | 0 | 0.3358 |
| SSPN | 115 | 0 | 0 | 0 | −0.0433 | 0.3358 |
| CTSK | 116 | 0 | −0.074 | 0 | −0.0411 | 0.3336 |
| WWTR1 | 117 | 0 | −0.1856 | 0 | −0.0028 | 0.3325 |
| CYBRD1 | 118 | 0 | −0.0268 | 0 | −0.0662 | 0.329 |
| CLIP4 | 119 | 0 | −0.0923 | 0 | −0.1143 | 0.3283 |
| ZEB2 | 120 | 0 | −0.1273 | 0 | −0.1365 | 0.3267 |
| SYNM | 121 | 0 | −0.0164 | 0 | 0 | 0.3223 |
| SNAI2 | 122 | 0 | −0.0348 | 0 | −0.0455 | 0.3213 |
| DES | 123 | 0 | 0 | 0 | 0 | 0.3147 |
| IGF1 | 124 | −0.014 | 0 | 0 | 0 | 0.3133 |
| TNC | 125 | 0 | −0.1062 | 0 | −0.1138 | 0.3128 |
| GUCY1A3 | 126 | 0 | −0.1277 | 0 | −0.0191 | 0.3077 |
| GULP1 | 127 | 0 | −0.1147 | 0 | 0 | 0.3058 |
| TMEM45A | 128 | 0.0313 | 0 | −0.0696 | −0.2556 | 0.3047 |
| C3 | 129 | 0 | −0.0565 | 0 | −0.1239 | 0.3027 |
| VCAM1 | 130 | 0.0117 | −0.0382 | 0 | −0.1361 | 0.3024 |
| AHNAK2 | 131 | 0 | 0 | −0.0576 | −0.0272 | 0.3022 |
| ACTG2 | 132 | 0 | −0.0303 | 0 | 0 | 0.3016 |
| KAL1 | 133 | 0 | 0 | −0.0417 | 0 | 0.2927 |
| FLNA | 134 | 0 | −0.083 | 0 | 0 | 0.2923 |
| CYR61 | 135 | 0 | 0 | 0 | −0.1072 | 0.2894 |
| NR3C1 | 136 | 0.0048 | −0.1514 | 0 | −0.1891 | 0.2873 |
| DSE | 137 | 0.1549 | −0.0464 | 0 | −0.1602 | 0.2871 |
| PMP22 | 138 | 0 | 0 | 0 | −0.1767 | 0.2832 |
| RBMS1 | 139 | 0 | −0.262 | 0 | 0 | 0.2827 |
| SMARCA1 | 140 | 0 | 0 | −0.0477 | 0 | 0.2797 |
| MAFB | 141 | 0.2127 | −2.00E−04 | 0 | −0.2472 | 0.2746 |
| MAF | 142 | 0 | −0.1091 | 0 | −0.0921 | 0.2734 |
| QKI | 143 | 0.0273 | −0.1498 | 0 | −0.0453 | 0.2713 |
| MMP11 | 144 | 0 | −0.0176 | 0 | 0 | 0.265 |
| CD109 | 145 | 0.1778 | 0 | −0.0866 | −0.1737 | 0.262 |
| SRPX | 146 | 0 | 0 | 0 | −0.045 | 0.2609 |
| EDNRA | 147 | 0 | −0.1215 | 0 | 0 | 0.2602 |
| THBS1 | 148 | 0 | −0.1967 | 0 | 0 | 0.2592 |
| SLC2A3 | 149 | 0.1804 | −0.0548 | −0.0582 | −0.1109 | 0.2585 |
| CHRDL1 | 150 | 0 | −0.0152 | 0 | 0 | 0.2566 |
| APOD | 151 | −0.0583 | 0 | 0 | 0 | 0.2543 |
| RUNX2 | 152 | 0 | 0 | −0.0489 | 0 | 0.2543 |
| COL14A1 | 153 | 0 | 0 | 0 | 0 | 0.2536 |
| GPX3 | 154 | 0 | 0 | 0 | −0.0397 | 0.2519 |
| UBE2E2 | 155 | 0.0158 | 0 | 0 | −0.0714 | 0.2511 |
| GEM | 156 | 0 | −0.0542 | 0 | 0 | 0.2508 |
| LY96 | 157 | 0.24 | −0.0506 | 0 | −0.2613 | 0.2481 |
| FAM126A | 158 | 0 | −0.0339 | 0 | 0 | 0.2475 |
| ANK2 | 159 | 0 | 0 | 0 | 0 | 0.2474 |
| CTGF | 160 | 0 | −0.0021 | 0 | −0.014 | 0.2453 |
| SORBS1 | 161 | −0.1716 | −0.1959 | 0 | 0.0931 | 0.2448 |
| RGS2 | 162 | 0.1026 | 0 | 0 | −0.2979 | 0.2431 |
| C1S | 163 | 0 | 0 | 0 | −0.0506 | 0.2405 |
| CD36 | 164 | 0 | 0 | 0 | −0.0184 | 0.2401 |
| NRP1 | 165 | 0.1361 | −0.032 | 0 | −0.1398 | 0.2378 |
| KLHL5 | 166 | 0 | −0.0881 | 0 | 0 | 0.2345 |
| CFH | 167 | 0 | 0 | 0 | −0.1274 | 0.2341 |
| SPP1 | 168 | 0.2055 | 0 | −0.089 | −0.161 | 0.2331 |
| RDX | 169 | 0 | −0.2345 | 0 | 0 | 0.23 |
| ADH1B | 170 | −0.0944 | −0.047 | 0.3588 | −0.1223 | 0.2296 |
| CCL2 | 171 | 0 | −0.0809 | 0 | −0.1288 | 0.2286 |
| BASP1 | 172 | 0.0223 | −0.0057 | 0 | −0.1244 | 0.2276 |
| ID4 | 173 | −0.0998 | 0 | 0 | 0 | 0.2267 |
| MDFIC | 174 | 0 | 0 | 0 | −0.0892 | 0.2238 |
| RASSF8 | 175 | 0 | −0.0625 | 0 | 0 | 0.2183 |
| C11orf96 | 176 | 0 | −0.0504 | 0 | −0.0452 | 0.2129 |
| TSPAN2 | 177 | 0 | −0.0929 | 0 | 0 | 0.2064 |
| MEIS2 | 178 | 0.1239 | 0 | 0 | −0.2462 | 0.2042 |
| AMIGO2 | 179 | 0 | 0 | −0.1191 | 0 | 0.199 |
| SHISA2 | 180 | 0 | 0 | 0 | 0 | 0.1975 |
| APOE | 181 | 0.3899 | −0.0674 | −0.1223 | −0.1748 | 0.1969 |
| C5AR1 | 182 | 0.0945 | −0.0012 | −0.0172 | −0.055 | 0.1913 |
| ZCCHC24 | 183 | −0.0876 | −0.2512 | 0 | 0.0882 | 0.1825 |
| MS4A7 | 184 | 0.2031 | −0.0117 | 0 | −0.2421 | 0.1814 |
| DPYD | 185 | 0.3389 | −0.1117 | 0 | −0.3262 | 0.1803 |
| PLXNC1 | 186 | 0.1817 | 0 | 0 | −0.2341 | 0.1757 |
| CFL2 | 187 | 0 | 0 | 0 | −0.0022 | 0.1749 |
| ITGAM | 188 | 0.1167 | 0 | −0.0376 | −0.0827 | 0.1721 |
| SERPINE1 | 189 | 0 | 0 | 0 | 0 | 0.1697 |
| SFRP1 | 190 | 0 | 0 | 0 | 0 | 0.1696 |
| DACT1 | 191 | 0 | 0.0014 | −0.0301 | 0 | 0.1685 |
| CLEC2B | 192 | 0.293 | −0.0682 | 0 | −0.2304 | 0.1652 |
| PAPPA | 193 | 0 | 0 | 0 | 0 | 0.1613 |
| APOC1 | 194 | 0.2984 | −0.1191 | −0.0933 | −0.0629 | 0.1551 |
| RORA | 195 | 0 | −0.1148 | 0 | 0 | 0.1522 |
| CAV2 | 196 | 0.0124 | 0 | 0 | −0.1146 | 0.1474 |
| HDGFRP3 | 197 | 0 | −0.1806 | 0 | 0 | 0.1447 |
| CCL18 | 198 | 0.4083 | −0.1493 | 0 | −0.2446 | 0.1444 |
| ADAMTS1 | 199 | 0 | −0.0193 | 0 | −0.0499 | 0.1373 |
| TBC1D9 | 200 | 0 | −0.1026 | 0 | 0 | 0.1353 |
| KCNMA1 | 201 | 0 | 0 | 0 | −0.0697 | 0.1342 |
| SPON1 | 202 | 0 | 0 | 0.0617 | −0.3125 | 0.1331 |
| MS4A4A | 203 | 0.2638 | −0.0508 | 0 | −0.2333 | 0.1295 |
| PDZRN3 | 204 | 0 | 0 | 0 | 0 | 0.1203 |
| DMD | 205 | −0.2224 | −0.0806 | 0 | 0.1747 | 0.1199 |
| ABI3BP | 206 | 0 | 0 | 0.0262 | 0 | 0.1152 |
| CD163 | 207 | 0.3286 | 0 | 0 | −0.2196 | 0.1121 |
| ABCA8 | 208 | −0.0414 | −0.0288 | 0.1135 | 0 | 0.1119 |
| TYROBP | 209 | 0.263 | 0 | 0 | −0.1942 | 0.1082 |
| FCGR1B | 210 | 0.3114 | −0.059 | −0.1141 | −0.0594 | 0.1054 |
| NCF2 | 211 | 0.303 | 0 | 0 | −0.158 | 0.0996 |
| FCER1G | 212 | 0.3583 | −0.0311 | 0 | −0.2246 | 0.0924 |
| CXCR4 | 213 | 0.2815 | 0 | 0 | −0.3503 | 0.0909 |
| FPR3 | 214 | 0.1715 | 0 | 0 | −0.082 | 0.0885 |
| LAPTM5 | 215 | 0.2666 | 0 | 0 | −0.1998 | 0.0838 |
| PLA1A | 216 | 0 | −0.0425 | −0.0425 | 0 | 0.0837 |
| ANXA1 | 217 | 0.1687 | 0 | −0.0087 | −0.2138 | 0.0831 |
| STC1 | 218 | 0.0323 | 0 | −0.0956 | 0 | 0.083 |
| BEX4 | 219 | 0 | −0.0578 | 0 | 0 | 0.0795 |
| WASF3 | 220 | −0.0237 | −0.0554 | 0 | 0 | 0.0787 |
| SCRN1 | 221 | 0 | −0.0812 | 0 | 0.0666 | 0.0756 |
| CHI3L1 | 222 | 0.0141 | −0.1499 | 0 | 0 | 0.0754 |
| PMEPA1 | 223 | −0.2985 | 0 | 0 | 0.2167 | 0.074 |
| CPE | 224 | −0.2802 | 0 | 0 | 0 | 0.074 |
| SOCS3 | 225 | 0.0681 | 0 | 0 | −0.0698 | 0.0668 |
| BHLHE41 | 226 | 0 | 0 | 0 | −0.1473 | 0.0667 |
| EVI2A | 227 | 0.2373 | 0 | 0 | −0.1574 | 0.0546 |
| ALOX5AP | 228 | 0.1023 | 0 | 0 | −0.092 | 0.0477 |
| CD14 | 229 | 0.2155 | 0 | 0 | −0.2552 | 0.0451 |
| TREM1 | 230 | 0.103 | 0 | −0.0561 | 0 | 0.0447 |
| ETV1 | 231 | 0 | 0 | −0.0593 | −0.0322 | 0.0431 |
| TNFSF13B | 232 | 0.4332 | 0 | −0.0281 | −0.1973 | 0.0427 |
| ITGB2 | 233 | 0.3009 | 0 | 0 | −0.1837 | 0.0382 |
| SLAMF8 | 234 | 0.3982 | 0 | −0.0215 | −0.1979 | 0.0355 |
| CLEC7A | 235 | 0.2954 | −0.0099 | −0.0172 | −0.0839 | 0.0343 |
| KLF9 | 236 | 0 | 0 | 0 | −0.1643 | 0.0338 |
| ENPP2 | 237 | 0 | 0 | 0 | −0.1075 | 0.0326 |
| NRXN3 | 238 | −0.0085 | 0 | −0.0305 | 0.0889 | 0.0311 |
| RGS1 | 239 | 0.1966 | −0.0132 | 0 | −0.1633 | 0.0311 |
| KRT80 | 240 | 0 | 0 | −0.2292 | 0.0388 | 0.0274 |
| TPSAB1 | 241 | 0 | 0 | 0.1991 | −0.061 | 0.0274 |
| SERPINE2 | 242 | −0.1377 | 0 | 0 | 0.1315 | 0.027 |
| KCTD12 | 243 | 0.0303 | 0 | 0 | −0.3168 | 0.0255 |
| S100A8 | 244 | 0.2099 | 0 | 0 | −0.1567 | 0.023 |
| CDKN2B | 245 | 0 | −0.1792 | 0.3967 | −0.1245 | 0.0219 |
| FCGR3B | 246 | 0.2736 | 0 | 0 | −0.1038 | 0.0214 |
| MS4A6A | 247 | 0.168 | 0 | 0 | −0.1139 | 0.02 |
| CPA3 | 248 | 0 | 0 | 0.1955 | −0.0899 | 0.0185 |
| C1QC | 249 | 0.3111 | 0 | 0 | −0.1887 | 0.0149 |
| TPSB2 | 250 | 0 | 0 | 0.1966 | −0.0626 | 0.014 |
| GXYLT2 | 251 | 0 | 0 | −0.0385 | 0.0903 | 0.0126 |
| SRPX2 | 252 | −0.1793 | −0.2719 | 0 | 0.3665 | 0.0107 |
| HSPA6 | 253 | 0.1683 | 0 | −0.165 | 0 | 0.0099 |
| ANO1 | 254 | 0.0451 | 0.1479 | −0.0344 | −0.2397 | 0.0081 |
| EPDR1 | 255 | −0.3884 | −0.1589 | 0 | 0.4415 | 0.0075 |
| HCLS1 | 256 | 0.2762 | 0 | 0 | −0.2442 | 0.0063 |
| APOLD1 | 257 | −0.1946 | −0.0759 | 0 | 0.2333 | 0.0053 |
| BCL2A1 | 258 | 0.3177 | 0 | 0 | −0.1648 | 0.0025 |
| SRGN | 259 | 0.2157 | 0 | 0 | −0.2038 | 5.00E−04 |
| LY6G6D | 260 | −0.4422 | −0.2319 | 0 | 0.6117 | 0 |
| EREG | 261 | −0.1965 | −0.5456 | 0 | 0.5013 | 0 |
| CEL | 262 | −0.2926 | −0.2292 | 0 | 0.4797 | 0 |
| KRT23 | 263 | −0.3572 | −0.1254 | 0 | 0.4685 | 0 |
| ACSL6 | 264 | −0.2303 | −0.1453 | 0 | 0.4613 | 0 |
| QPRT | 265 | −0.4367 | 0 | 0 | 0.4572 | 0 |
| AXIN2 | 266 | −0.48 | 0 | 0 | 0.436 | 0 |
| ABAT | 267 | −0.3786 | −0.1499 | 0 | 0.4343 | 0 |
| FARP1 | 268 | −0.3058 | −0.0872 | 0 | 0.4285 | 0 |
| CELP | 269 | −0.2018 | −0.1363 | 0 | 0.4263 | 0 |
| C13orf18 | 270 | −0.4156 | −0.1525 | 0 | 0.426 | 0 |
| HUNK | 271 | −0.2609 | 0 | 0 | 0.4218 | 0 |
| PLCB4 | 272 | −0.4897 | 0 | 0 | 0.4136 | 0 |
| APCDD1 | 273 | −0.3273 | 0 | 0 | 0.4095 | 0 |
| RNF43 | 274 | −0.3117 | 0 | 0 | 0.4086 | 0 |
| ASCL2 | 275 | −0.1967 | 0 | 0 | 0.4035 | 0 |
| CHN2 | 276 | −0.3353 | 0 | 0 | 0.3934 | 0 |
| AREG | 277 | −0.1461 | −0.2009 | 0 | 0.3823 | 0 |
| PAH | 278 | −0.1139 | 0 | 0 | 0.3687 | 0 |
| NR1I2 | 279 | −0.3552 | 0 | 0 | 0.3667 | 0 |
| FREM2 | 280 | −0.1792 | 0 | 0 | 0.3607 | 0 |
| CTTNBP2 | 281 | −0.3476 | 0 | 0 | 0.3606 | 0 |
| GNG4 | 282 | −0.2338 | −0.1537 | 0 | 0.3511 | 0 |
| PRR15 | 283 | −0.2217 | 0 | 0 | 0.3502 | 0 |
| LOC100288092 | 284 | −0.1822 | −0.0349 | 0 | 0.3502 | 0 |
| CFTR | 285 | −0.2225 | 0 | 0 | 0.3464 | 0 |
| BCL11A | 286 | −0.201 | 0 | 0 | 0.3452 | 0 |
| ERP27 | 287 | −0.1786 | 0 | 0 | 0.3432 | 0 |
| PLA2G12B | 288 | −0.115 | −0.0374 | 0 | 0.3421 | 0 |
| DACH1 | 289 | −0.5464 | 0.0663 | 0 | 0.3403 | 0 |
| SPINS | 290 | −0.327 | 0 | −0.0258 | 0.3389 | 0 |
| GGH | 291 | −0.0849 | 0 | 0 | 0.3381 | 0 |
| ACE2 | 292 | −0.2197 | −0.0697 | 0 | 0.3294 | 0 |
| PTPRO | 293 | −0.338 | 0 | 0 | 0.3288 | 0 |
| DPEP1 | 294 | −0.2676 | 0 | 0 | 0.327 | 0 |
| PROX1 | 295 | −0.1874 | 0 | 0 | 0.3247 | 0 |
| ZNRF3 | 296 | −0.1387 | 0 | −0.0483 | 0.3199 | 0 |
| CAB39L | 297 | −0.2759 | −0.0576 | 0 | 0.3197 | 0 |
| LRRC2 | 298 | −0.1842 | 0 | 0 | 0.3162 | 0 |
| REEP1 | 299 | −0.23 | −0.1301 | 0 | 0.312 | 0 |
| CYP2B6 | 300 | −0.1027 | 0 | 0 | 0.2973 | 0 |
| LAMP2 | 301 | −0.1476 | 0 | 0 | 0.2972 | 0 |
| PPP1R14C | 302 | −0.2014 | 0 | 0 | 0.2909 | 0 |
| CBX5 | 303 | −0.245 | 0 | 0 | 0.2881 | 0 |
| NOX1 | 304 | −0.2615 | 0 | 0 | 0.2878 | 0 |
| SLC22A3 | 305 | −0.1052 | 0 | −0.0938 | 0.2869 | 0 |
| TCFL5 | 306 | 0 | −0.0413 | 0 | 0.2846 | 0 |
| SATB2 | 307 | −0.1555 | −0.0645 | 0 | 0.283 | 0 |
| AREGB | 308 | −0.0648 | −0.0127 | 0 | 0.2791 | 0 |
| AZGP1 | 309 | −0.0255 | 0 | 0 | 0.2784 | 0 |
| TMEM150C | 310 | −0.231 | 0 | 0 | 0.2739 | 0 |
| LOC647979 | 311 | −0.1853 | 0 | 0 | 0.269 | 0 |
| LOC100128822 | 312 | −0.1377 | 0 | 0 | 0.2689 | 0 |
| CES1 | 313 | −0.1337 | −0.0587 | 0 | 0.2642 | 0 |
| PTCH1 | 314 | −0.232 | 0 | 0 | 0.263 | 0 |
| PRSS23 | 315 | −0.197 | 0 | −0.0032 | 0.262 | 0 |
| LOC729680 | 316 | 0 | 0 | 0 | 0.2589 | 0 |
| ZBTB10 | 317 | −0.2166 | −0.0677 | 0 | 0.2584 | 0 |
| PRAP1 | 318 | −0.2589 | 0 | 0 | 0.2571 | 0 |
| PM20D2 | 319 | −0.0216 | −0.096 | 0 | 0.2469 | 0 |
| SESN1 | 320 | −0.1806 | 0 | −0.0261 | 0.2444 | 0 |
| QPCT | 321 | −0.1104 | 0 | 0 | 0.2429 | 0 |
| ATP10B | 322 | −0.2544 | 0 | 0 | 0.2413 | 0 |
| ELAVL2 | 323 | 0 | 0 | 0 | 0.2408 | 0 |
| CLDN1 | 324 | 0 | 0 | −0.0731 | 0.2382 | 0 |
| C12orf66 | 325 | −0.0349 | 0 | 0 | 0.2374 | 0 |
| ST6GAL1 | 326 | 0 | −0.0604 | 0 | 0.236 | 0 |
| CTSL2 | 327 | 0 | 0 | 0 | 0.2354 | 0 |
| COL9A3 | 328 | −0.062 | 0 | 0 | 0.2352 | 0 |
| FGGY | 329 | −0.1413 | 0 | 0 | 0.235 | 0 |
| GSPT2 | 330 | −0.2263 | 0 | 0 | 0.2326 | 0 |
| KIAA1704 | 331 | −0.0637 | −0.0524 | 0 | 0.2324 | 0 |
| CYP4F3 | 332 | −0.0075 | −0.0151 | 0 | 0.2295 | 0 |
| SLC19A3 | 333 | −0.0222 | 0 | 0 | 0.2258 | 0 |
| FLJ22763 | 334 | −0.2682 | 0 | 0 | 0.2222 | 0 |
| DNAJC6 | 335 | −0.0255 | 0 | 0 | 0.2166 | 0 |
| FOXQ1 | 336 | −0.0192 | 0 | −0.219 | 0.2165 | 0 |
| MIR374AHG | 337 | −0.2713 | 0 | 0 | 0.2151 | 0 |
| CDCA7 | 338 | 0 | 0 | 0 | 0.2142 | 0 |
| MACC1 | 339 | −0.0934 | 0 | 0 | 0.2136 | 0 |
| OXGR1 | 340 | −0.0511 | 0 | 0 | 0.2133 | 0 |
| PPP2R2C | 341 | −0.0238 | 0 | 0 | 0.2101 | 0 |
| SAMD12 | 342 | −0.3228 | 0 | 0 | 0.207 | 0 |
| CDHR1 | 343 | −0.1486 | 0 | 0 | 0.2067 | 0 |
| NFIB | 344 | −0.3221 | 0 | 0 | 0.2061 | 0 |
| LOC25845 | 345 | −0.0573 | −0.1104 | 0.0266 | 0.2059 | 0 |
| PRLR | 346 | −0.0921 | 0 | 0 | 0.2056 | 0 |
| PTPRD | 347 | −0.1715 | 0 | 0 | 0.2049 | 0 |
| PLAGL1 | 348 | −0.1341 | 0 | 0 | 0.196 | 0 |
| WIF1 | 349 | −0.0592 | 0 | 0 | 0.1958 | 0 |
| CADPS | 350 | −0.2793 | 0.1153 | 0 | 0.1946 | 0 |
| TOB1 | 351 | −0.3904 | 0 | 0 | 0.1943 | 0 |
| MFAP3L | 352 | −0.0401 | 0 | 0 | 0.1941 | 0 |
| MAP7D2 | 353 | −0.0732 | −0.0514 | 0 | 0.1869 | 0 |
| FAM92A1 | 354 | −0.0126 | 0 | −0.0275 | 0.1866 | 0 |
| MUC20 | 355 | −0.2974 | 0 | 0.0492 | 0.1832 | 0 |
| RBM6 | 356 | −0.3166 | 0 | 0 | 0.1808 | 0 |
| PLCB1 | 357 | −0.0974 | 0 | −0.0728 | 0.1804 | 0 |
| HMGA2 | 358 | 0 | 0 | −0.0796 | 0.1802 | 0 |
| CBFA2T2 | 359 | −0.1817 | 0 | 0 | 0.1792 | 0 |
| TNMD | 360 | −0.0216 | 0 | 0 | 0.1775 | 0 |
| FABP6 | 361 | −0.1468 | 0 | 0 | 0.1764 | 0 |
| CEACAM6 | 362 | −0.2263 | 0 | 0 | 0.1748 | 0 |
| ZNF704 | 363 | −0.243 | 0 | 0 | 0.1733 | 0 |
| MYEF2 | 364 | −0.0974 | 0 | 0 | 0.1697 | 0 |
| GDF15 | 365 | 0 | 0 | −0.0544 | 0.1689 | 0 |
| CXCL14 | 366 | −0.4991 | 0 | 0 | 0.1688 | 0 |
| CEACAM5 | 367 | −0.1925 | 0 | 0 | 0.1687 | 0 |
| CDH17 | 368 | −0.1843 | 0 | 0 | 0.1668 | 0 |
| ENPP5 | 369 | −0.0607 | 0 | 0 | 0.1612 | 0 |
| C1orf103 | 370 | −0.0487 | 0 | 0 | 0.1583 | 0 |
| HOXA3 | 371 | −0.0889 | 0 | 0 | 0.1551 | 0 |
| EIF3B | 372 | −0.0227 | 0 | 0 | 0.1548 | 0 |
| LOC100289610 | 373 | −0.188 | 0 | 0 | 0.1546 | 0 |
| ASB9 | 374 | 0 | 0 | −0.1078 | 0.1527 | 0 |
| SLC26A2 | 375 | −0.4098 | −0.1876 | 0.5747 | 0.1523 | 0 |
| PHACTR3 | 376 | −0.0092 | −0.1282 | 0 | 0.1479 | 0 |
| GLS | 377 | 0 | −0.0262 | −0.0338 | 0.1478 | 0 |
| KIAA1199 | 378 | 0 | 0 | −0.2286 | 0.1423 | 0 |
| ZAK | 379 | 0 | 0 | −0.0518 | 0.1417 | 0 |
| NR1D2 | 380 | −0.1145 | 0 | 0 | 0.129 | 0 |
| RBP1 | 381 | −0.1254 | 0 | 0 | 0.129 | 0 |
| ZNF518B | 382 | −0.0681 | 0 | 0 | 0.1279 | 0 |
| GZMB | 383 | 0.1335 | −0.2025 | −0.0266 | 0.1237 | 0 |
| ANKRD10 | 384 | −0.1495 | 0 | 0 | 0.1216 | 0 |
| HENMT1 | 385 | −0.0707 | 0 | 0 | 0.118 | 0 |
| PLEKHB1 | 386 | −0.1526 | 0 | 0 | 0.1167 | 0 |
| FABP1 | 387 | −0.399 | 0 | 0.2884 | 0.1166 | 0 |
| ABCB1 | 388 | −0.189 | 0 | 0 | 0.1138 | 0 |
| MSX2 | 389 | 0 | 0.0851 | −0.2452 | 0.0891 | 0 |
| PDGFA | 390 | −0.1683 | 0 | 0.0013 | 0.0717 | 0 |
| IL17RD | 391 | −0.011 | 0 | −0.1659 | 0.0663 | 0 |
| LRRC16A | 392 | −0.1702 | 0.0048 | 0 | 0.066 | 0 |
| MUC12 | 393 | −0.5343 | 0 | 0.4773 | 0.0633 | 0 |
| HMGCS2 | 394 | −0.3122 | 0.028 | 0 | 0.0598 | 0 |
| FAM134B | 395 | −0.1392 | 0 | 0.0482 | 0.0458 | 0 |
| LEFTY1 | 396 | −0.2547 | 0 | 0.0763 | 0.0113 | 0 |
| TRPM6 | 397 | −0.2627 | −0.0093 | 0.5039 | 0 | 0 |
| PCK1 | 398 | −0.1474 | 0 | 0.4049 | 0 | 0 |
| EDN3 | 399 | −0.016 | 0 | 0.3932 | 0 | 0 |
| SEMA6D | 400 | −0.0291 | −0.0344 | 0.3414 | 0 | 0 |
| SCARA5 | 401 | −0.0852 | 0 | 0.3278 | 0 | 0 |
| METTL7A | 402 | −0.1623 | 0 | 0.3079 | 0 | 0 |
| HPGD | 403 | 0 | −0.0049 | 0.3033 | 0 | 0 |
| CLDN23 | 404 | 0 | −0.0373 | 0.2606 | 0 | 0 |
| SEPP1 | 405 | −0.1604 | 0 | 0.2215 | 0 | 0 |
| CNTN3 | 406 | −0.1222 | 0 | 0.2168 | 0 | 0 |
| SEMA6A | 407 | 0 | 0 | 0.2091 | 0 | 0 |
| PRKACB | 408 | −0.0976 | 0 | 0.2029 | 0 | 0 |
| KRT20 | 409 | −0.3208 | 0 | 0.1815 | 0 | 0 |
| EDNRB | 410 | −0.1973 | 0 | 0.163 | 0 | 0 |
| PID1 | 411 | −0.2336 | 0 | 0.128 | 0 | 0 |
| TSPAN7 | 412 | −0.15 | 0 | 0.1055 | 0 | 0 |
| SRI | 413 | −0.0689 | 0 | 0.0662 | 0 | 0 |
| PCCA | 414 | −0.0818 | 0.4502 | 0 | 0 | 0 |
| SMAD9 | 415 | −0.2481 | 0.365 | 0 | 0 | 0 |
| KLK11 | 416 | 0 | 0.2954 | 0 | 0 | 0 |
| PRUNE2 | 417 | −0.1028 | 0.2936 | 0 | 0 | 0 |
| C11orf93 | 418 | 0 | 0.2583 | 0 | 0 | 0 |
| MATN2 | 419 | −0.0711 | 0.233 | 0 | 0 | 0 |
| APOBEC1 | 420 | −0.0036 | 0.1449 | 0 | 0 | 0 |
| AIM2 | 421 | 0.3861 | 0 | 0 | 0 | 0 |
| AFAP1-AS1 | 422 | 0.1764 | 0 | 0 | 0 | 0 |
| CMPK2 | 423 | 0.2217 | −0.0104 | 0 | 0 | 0 |
| LY6E | 424 | 0.2662 | −0.049 | 0 | 0 | 0 |
| EPSTI1 | 425 | 0.1185 | −0.1598 | 0 | 0 | 0 |
| SLAIN1 | 426 | 0 | 0.3105 | −0.0173 | 0 | 0 |
| PIWIL1 | 427 | 0.2906 | 0 | −0.0227 | 0 | 0 |
| TNFSF9 | 428 | 0.2803 | 0 | −0.0343 | 0 | 0 |
| TMPRSS3 | 429 | 0.1663 | 0 | −0.0531 | 0 | 0 |
| ANKRD37 | 430 | 0.1106 | 0 | −0.0552 | 0 | 0 |
| WISP3 | 431 | 0 | 0.2378 | −0.0988 | 0 | 0 |
| RPL22L1 | 432 | 0.3107 | 0 | −0.1145 | 0 | 0 |
| IGF2BP3 | 433 | 0.2673 | 0 | −0.1308 | 0 | 0 |
| MFI2 | 434 | 0 | 0.102 | −0.1555 | 0 | 0 |
| CA9 | 435 | 0 | 0.2 | −0.1787 | 0 | 0 |
| C8orf84 | 436 | 0 | 0.3554 | −0.184 | 0 | 0 |
| PMAIP1 | 437 | 0.2598 | 0 | −0.2185 | 0 | 0 |
| FRMD5 | 438 | 0.1384 | 0 | −0.2581 | 0 | 0 |
| IFIT1 | 439 | 0.0962 | −0.1168 | 0 | −0.0045 | 0 |
| CALB1 | 440 | 0.2348 | 0 | −0.1107 | −0.0103 | 0 |
| ADRB1 | 441 | 0.0125 | 0.1577 | 0 | −0.0116 | 0 |
| STAT1 | 442 | 0.4213 | 0 | 0 | −0.0126 | 0 |
| MICB | 443 | 0.2977 | 0 | 0 | −0.0208 | 0 |
| ISG15 | 444 | 0.3148 | 0 | 0 | −0.0216 | 0 |
| IFI44L | 445 | 0.2383 | −0.0365 | 0 | −0.0293 | 0 |
| GBP4 | 446 | 0.5181 | 0 | 0 | −0.0304 | 0 |
| TLR8 | 447 | 0.2868 | 0 | −0.0144 | −0.0312 | 0 |
| DDX60 | 448 | 0.1355 | 0 | 0 | −0.0339 | 0 |
| P2RY14 | 449 | 0 | 0 | 0.1921 | −0.0349 | 0 |
| ADAMDEC1 | 450 | 0 | 0 | 0.2241 | −0.0421 | 0 |
| CPM | 451 | 0 | 0 | 0.3583 | −0.0446 | 0 |
| LCK | 452 | 0.3028 | 0 | 0 | −0.046 | 0 |
| GBP5 | 453 | 0.49 | 0 | −0.0152 | −0.0474 | 0 |
| IFIT2 | 454 | 0.2739 | −0.0225 | 0 | −0.0503 | 0 |
| PLA2G7 | 455 | 0.2799 | −0.0206 | 0 | −0.0551 | 0 |
| OAS2 | 456 | 0.2432 | 0 | 0 | −0.0603 | 0 |
| RSAD2 | 457 | 0.2188 | −0.1364 | 0 | −0.0635 | 0 |
| XAF1 | 458 | 0.2921 | 0 | 0 | −0.0641 | 0 |
| PNMA2 | 459 | 0.0477 | 0.0594 | −0.1392 | −0.0683 | 0 |
| MMP12 | 460 | 0.2904 | 0 | 0 | −0.07 | 0 |
| KIAA1211 | 461 | 0 | 0 | 0.115 | −0.073 | 0 |
| APOBEC3G | 462 | 0.4443 | −0.0042 | 0 | −0.0731 | 0 |
| IFI44 | 463 | 0.3353 | 0 | 0 | −0.074 | 0 |
| EPHA4 | 464 | 0 | 0.346 | 0 | −0.075 | 0 |
| FAM26F | 465 | 0.4467 | 0 | 0 | −0.0821 | 0 |
| GIMAP6 | 466 | 0.1788 | 0 | 0 | −0.0837 | 0 |
| HSPA2 | 467 | −0.0469 | 0.3272 | 0 | −0.0885 | 0 |
| CXCL11 | 468 | 0.4731 | 0 | 0 | −0.0907 | 0 |
| MNDA | 469 | 0.1817 | 0 | 0 | −0.0952 | 0 |
| CCL4 | 470 | 0.3826 | 0 | 0 | −0.0976 | 0 |
| TRBC1 | 471 | 0.2654 | 0 | 0 | −0.1004 | 0 |
| TAGAP | 472 | 0.1869 | 0 | 0 | −0.1035 | 0 |
| FGFR2 | 473 | 0 | 0.1763 | 0 | −0.1081 | 0 |
| CD55 | 474 | 0.0466 | 0.1687 | 0 | −0.1089 | 0 |
| CXCL9 | 475 | 0.5397 | 0 | −0.0055 | −0.1101 | 0 |
| CYBB | 476 | 0.2122 | 0 | 0 | −0.1111 | 0 |
| PLK2 | 477 | 0.2547 | 0 | −0.061 | −0.1115 | 0 |
| IL1RN | 478 | 0.2248 | 0 | 0 | −0.114 | 0 |
| HOXC6 | 479 | 0.4209 | 0 | −0.2279 | −0.1143 | 0 |
| BTN3A3 | 480 | 0.1554 | 0 | 0 | −0.1162 | 0 |
| BAG2 | 481 | 0.2725 | 0 | 0 | −0.1189 | 0 |
| IGLL3P | 482 | 0 | 0 | 0.0601 | −0.1194 | 0 |
| PLA2G4A | 483 | 0.1896 | 0.1581 | 0 | −0.1209 | 0 |
| BST2 | 484 | 0.4116 | 0 | 0 | −0.1213 | 0 |
| HLA-DMB | 485 | 0.382 | 0 | 0 | −0.1217 | 0 |
| SLAMF7 | 486 | 0.312 | 0 | 0 | −0.1229 | 0 |
| IGLV1-44 | 487 | 0.0202 | 0 | 0.1734 | −0.1247 | 0 |
| IFIT3 | 488 | 0.3968 | 0 | 0 | −0.126 | 0 |
| GBP1 | 489 | 0.5015 | −0.0061 | 0 | −0.1332 | 0 |
| IGJ | 490 | 0 | 0 | 0.4497 | −0.1364 | 0 |
| FSCN1 | 491 | 0.1698 | 0 | −0.0764 | −0.1381 | 0 |
| FYB | 492 | 0.2848 | 0 | 0 | −0.1386 | 0 |
| CXCL10 | 493 | 0.5197 | 0 | 0 | −0.1394 | 0 |
| CD74 | 494 | 0.3213 | 0 | 0 | −0.1423 | 0 |
| SERPINB5 | 495 | 0.1117 | 0.1027 | 0 | −0.1425 | 0 |
| IFI6 | 496 | 0.2833 | 0 | 0 | −0.147 | 0 |
| FGL2 | 497 | 0.1238 | 0 | 0 | −0.1474 | 0 |
| PRKAR2B | 498 | 0.0934 | 0 | 0 | −0.1513 | 0 |
| POU2AF1 | 499 | 0 | 0 | 0.131 | −0.1532 | 0 |
| BIRC3 | 500 | 0.4733 | 0 | 0 | −0.1535 | 0 |
| EPB41L3 | 501 | 0 | 0 | 0.1808 | −0.1547 | 0 |
| MPEG1 | 502 | 0.091 | 0 | 0 | −0.1574 | 0 |
| IGKC | 503 | 0 | 0 | 0.0947 | −0.1618 | 0 |
| CCL8 | 504 | 0.3808 | −0.0649 | 0 | −0.1634 | 0 |
| IFI16 | 505 | 0.2516 | 0 | 0 | −0.17 | 0 |
| MT1F | 506 | 0.1194 | 0 | 0.113 | −0.1761 | 0 |
| CSF2RB | 507 | 0.2068 | 0 | 0 | −0.1775 | 0 |
| SAMD9 | 508 | 0.1828 | 0 | 0 | −0.1809 | 0 |
| LYZ | 509 | 0.2329 | 0.1665 | 0 | −0.1816 | 0 |
| MMP28 | 510 | 0 | 0.0164 | 0.2038 | −0.1829 | 0 |
| CCL5 | 511 | 0.5145 | 0 | 0 | −0.1855 | 0 |
| HLA-DPA1 | 512 | 0.4238 | 0 | 0 | −0.1885 | 0 |
| HLA-DMA | 513 | 0.4118 | 0 | 0 | −0.191 | 0 |
| KYNU | 514 | 0.4072 | 0 | −0.0714 | −0.1914 | 0 |
| CFD | 515 | 0.0805 | 0 | 0 | −0.1943 | 0 |
| CD69 | 516 | 0.2467 | 0 | 0 | −0.1981 | 0 |
| ITM2A | 517 | 0.0869 | 0 | 0 | −0.1983 | 0 |
| TRIM22 | 518 | 0.2913 | 0 | 0 | −0.2005 | 0 |
| MT1M | 519 | 0 | 0 | 0.5267 | −0.2011 | 0 |
| C1QA | 520 | 0.3547 | 0 | 0 | −0.2015 | 0 |
| HLA-DPB1 | 521 | 0.3403 | 0 | 0 | −0.2053 | 0 |
| LCP2 | 522 | 0.3956 | −0.0091 | 0 | −0.2147 | 0 |
| MT1G | 523 | 0.1359 | 0 | 0.0953 | −0.2166 | 0 |
| C1QB | 524 | 0.3862 | 0 | 0 | −0.221 | 0 |
| CD53 | 525 | 0.3244 | 0 | 0 | −0.2255 | 0 |
| CYTIP | 526 | 0.1751 | 0 | 0 | −0.2264 | 0 |
| SAMSN1 | 527 | 0.344 | 0 | 0 | −0.2288 | 0 |
| HLA-DRA | 528 | 0.3527 | 0 | 0 | −0.255 | 0 |
| CD52 | 529 | 0.2716 | 0 | 0 | −0.2573 | 0 |
| EVI2B | 530 | 0.2485 | 0 | 0 | −0.2577 | 0 |
| MT1H | 531 | 0.1867 | 0 | 0.0606 | −0.2578 | 0 |
| PTPRC | 532 | 0.3709 | −0.0259 | 0 | −0.2584 | 0 |
| SAMD9L | 533 | 0.4904 | 0 | 0 | −0.2659 | 0 |
| DAPK1 | 534 | 0.1474 | 0.1093 | −0.0256 | −0.2736 | 0 |
| DUSP4 | 535 | 0.3433 | 0.3562 | −0.2053 | −0.2761 | 0 |
| RARRES3 | 536 | 0.5944 | 0 | 0 | −0.2781 | 0 |
| MT1X | 537 | 0.2251 | 0 | 0 | −0.2785 | 0 |
| DOCK8 | 538 | 0.2125 | 0 | 0 | −0.2859 | 0 |
| MT2A | 539 | 0.2765 | 0 | 0 | −0.288 | 0 |
| CRIP1 | 540 | 0.227 | 0.1036 | 0 | −0.2928 | 0 |
| CXCL13 | 541 | 0.6193 | −0.0086 | 0 | −0.2928 | 0 |
| MT1E | 542 | 0.2144 | 0 | 0.1515 | −0.3251 | 0 |
| ALOX5 | 543 | 0.116 | 0.1858 | 0 | −0.3513 | 0 |
| RARRES1 | 544 | 0.1835 | 0 | 0 | −0.3703 | 0 |
| GRM8 | 545 | −0.1842 | 0 | 0 | 0.3559 | −0.0017 |
| FAM55D | 546 | −0.2397 | 0 | 0.4172 | 0 | −0.0021 |
| ABP1 | 547 | −0.3797 | 0 | 0.1849 | 0.0557 | −0.0035 |
| LOC401022 | 548 | 0 | 0 | 0.1009 | −0.0626 | −0.0046 |
| ISX | 549 | −0.2577 | 0 | 0.2822 | 0.1497 | −0.0047 |
| CDC6 | 550 | 0.044 | 0 | −0.1237 | 0.028 | −0.0047 |
| FAM105A | 551 | −0.2265 | 0 | 0 | 0.2478 | −0.005 |
| IDO1 | 552 | 0.5825 | 0 | 0 | −0.0333 | −0.0055 |
| SLC28A3 | 553 | 0.1386 | 0.2023 | −0.109 | 0 | −0.006 |
| CDK6 | 554 | −0.0651 | 0.0397 | 0 | 0.1329 | −0.0062 |
| TFF2 | 555 | 0.1662 | 0.0636 | 0 | 0 | −0.0067 |
| PITX2 | 556 | 0 | 0 | 0 | 0.1789 | −0.0068 |
| NEBL | 557 | −0.0922 | 0 | 0 | 0.2638 | −0.0069 |
| ANXA10 | 558 | 0.2257 | 0 | −0.0479 | 0 | −0.0071 |
| GPR160 | 559 | −0.0944 | 0 | 0 | 0.2195 | −0.0073 |
| PAQR5 | 560 | 0 | −0.0031 | 0.0384 | 0.0606 | −0.0081 |
| CCL24 | 561 | −0.1823 | 0.2141 | 0 | 0.0784 | −0.0085 |
| VNN1 | 562 | 0.2993 | 0.0071 | 0 | −0.2398 | −0.0087 |
| WFDC2 | 563 | −0.0944 | 0.2396 | 0 | 0 | −0.0102 |
| PSMB9 | 564 | 0.3035 | 0 | 0 | 0 | −0.0103 |
| GZMA | 565 | 0.5439 | 0 | 0 | −0.2148 | −0.0103 |
| VAV3 | 566 | −0.4096 | 0 | 0 | 0.423 | −0.0118 |
| LY75 | 567 | 0 | 0 | 0 | 0.2712 | −0.0119 |
| CACNA1D | 568 | −0.2181 | 0 | 0 | 0.3298 | −0.0122 |
| TBX3 | 569 | 0 | 0.2417 | −0.1916 | 0 | −0.0155 |
| MFSD4 | 570 | −0.0284 | 0 | 0.4083 | 0 | −0.0157 |
| ATP8A1 | 571 | 0 | 0.0759 | 0 | −0.0393 | −0.0167 |
| PPP1R14D | 572 | −0.2943 | 0 | 0.0147 | 0.2496 | −0.0177 |
| FRMD3 | 573 | 0 | 0 | 0.125 | −0.0431 | −0.0181 |
| CPS1 | 574 | 0 | 0.3391 | −0.005 | 0 | −0.0196 |
| CYP39A1 | 575 | −0.2247 | 0 | 0 | 0.2655 | −0.02 |
| IL1R2 | 576 | 0.1142 | 0.2611 | 0 | −0.2802 | −0.0202 |
| IGHM | 577 | 0 | 0 | 0.2346 | −0.1786 | −0.0209 |
| GABRP | 578 | 0.0041 | 0.1624 | 0 | 0 | −0.0221 |
| ARSE | 579 | −0.0085 | 0 | 0 | 0.2053 | −0.0253 |
| ZIC2 | 580 | 0.3979 | 0 | 0 | −0.1145 | −0.0299 |
| TNFRSF17 | 581 | 0 | 0 | 0.1733 | 0 | −0.0334 |
| LOC653602 | 582 | −0.151 | 0 | 0 | 0.1509 | −0.0362 |
| SPAG1 | 583 | 0 | 0 | 0 | 0.1439 | −0.0395 |
| NEDD4L | 584 | −0.0333 | 0 | 0.0707 | 0 | −0.0399 |
| UGT2A3 | 585 | −0.2127 | −0.0638 | 0.4365 | 0.0923 | −0.0404 |
| SLC1A1 | 586 | 0.0619 | 0 | 0 | −0.0697 | −0.041 |
| LGALS2 | 587 | 0 | 0 | 0.2603 | 0 | −0.0413 |
| CLDN8 | 588 | −0.0779 | −0.0473 | 0.9237 | 0 | −0.0415 |
| TOX | 589 | 0 | 0.5363 | 0 | −0.1211 | −0.0441 |
| TFAP2A | 590 | 0.3438 | 0.2136 | −0.189 | −0.069 | −0.0444 |
| TOX3 | 591 | 0 | 0 | 0 | 0.1406 | −0.0465 |
| C17orf73 | 592 | −0.0771 | 0 | 0.0831 | 0.0209 | −0.0475 |
| MLPH | 593 | 0 | 0.33 | 0 | −0.1434 | −0.0511 |
| FAS | 594 | 0.1759 | 0 | 0.0573 | −0.1003 | −0.0522 |
| F3 | 595 | 0.0335 | 0.1539 | 0 | −0.0159 | −0.0529 |
| FMO5 | 596 | −0.1242 | 0 | 0.0561 | 0 | −0.0544 |
| SPINK1 | 597 | −0.2495 | 0 | 0 | 0.1836 | −0.055 |
| GUCY2C | 598 | −0.3597 | 0 | 0 | 0.2594 | −0.0562 |
| FGFR3 | 599 | −0.0124 | 0 | 0 | 0.1569 | −0.0564 |
| PCSK1 | 600 | −0.0537 | 0.5971 | 0 | 0 | −0.0574 |
| TCN1 | 601 | 0 | 0.6045 | −0.012 | −0.1313 | −0.0578 |
| MALL | 602 | 0 | 0 | 0.1103 | 0 | −0.0579 |
| SLC3A1 | 603 | −0.2476 | 0 | 0 | 0.2101 | −0.0584 |
| CD177 | 604 | 0 | 0 | 0.4963 | −0.0076 | −0.059 |
| HNRNPH1 | 605 | 0.1863 | 0 | 0 | 0 | −0.0593 |
| TMEM37 | 606 | 0 | 0 | 0.3281 | 0 | −0.0596 |
| E2F7 | 607 | 0.1305 | 0 | −0.1327 | 0 | −0.0612 |
| CLDN3 | 608 | −0.1747 | 0 | 0 | 0.2229 | −0.0614 |
| DHRS11 | 609 | −0.0404 | 0 | 0.2028 | 0.0508 | −0.0625 |
| SERPINA1 | 610 | 0 | 0.4433 | 0 | −0.0382 | −0.0625 |
| SLC16A9 | 611 | −0.0604 | 0 | 0.061 | 0.0346 | −0.0639 |
| GNLY | 612 | 0.5097 | 0 | 0 | −0.0483 | −0.0645 |
| ZNF165 | 613 | 0.1911 | 0 | −0.0189 | 0 | −0.0666 |
| UGT2B17 | 614 | −0.091 | 0 | 0.4545 | 0 | −0.0669 |
| CLDN18 | 615 | 0.1004 | 0.0605 | 0 | 0 | −0.0672 |
| ZFP36L2 | 616 | −0.0876 | 0 | 0 | 0.1365 | −0.0678 |
| LOC646627 | 617 | −0.286 | 0 | 0.7338 | 0 | −0.0682 |
| ANXA13 | 618 | 0 | 0.1626 | 0 | 0 | −0.0691 |
| LASS6 | 619 | 0 | 0 | 0 | 0.1218 | −0.0697 |
| TFF3 | 620 | 0 | 0.2859 | 0 | 0 | −0.0699 |
| SGK2 | 621 | −0.2125 | 0 | 0.0205 | 0.3224 | −0.0713 |
| RNF125 | 622 | 0.1626 | 0.0824 | 0.0249 | −0.2444 | −0.0719 |
| CHP2 | 623 | −0.2525 | 0 | 0.412 | 0 | −0.0724 |
| ANKRD43 | 624 | −0.2059 | 0 | 0.0255 | 0.3164 | −0.074 |
| PYY | 625 | 0 | 0 | 0.5285 | 0 | −0.077 |
| B3GNT7 | 626 | 0 | 0 | 0.6661 | −0.0172 | −0.0773 |
| FAM84A | 627 | −0.2409 | 0 | 0 | 0.2504 | −0.0775 |
| SCGB2A1 | 628 | 0 | 0.1165 | 0.2545 | −0.022 | −0.0782 |
| BLNK | 629 | 0 | 0.1155 | 0 | −0.0025 | −0.0784 |
| DEFA5 | 630 | −0.2069 | 0.4097 | 0 | 0 | −0.0796 |
| STS | 631 | 0.137 | 0.0511 | 0 | −0.0493 | −0.0797 |
| AQP8 | 632 | −0.0967 | −0.0503 | 0.6919 | 0 | −0.0813 |
| DDC | 633 | −0.0506 | 0 | 0 | 0.3179 | −0.0814 |
| SLC26A3 | 634 | −0.4869 | −0.3214 | 0.8633 | 0.2214 | −0.0827 |
| ENPP3 | 635 | −0.2751 | 0 | 0.068 | 0.2982 | −0.083 |
| MOCOS | 636 | 0.1547 | 0 | 0 | 0 | −0.083 |
| ARL14 | 637 | 0 | 0 | 0.2233 | 0 | −0.0847 |
| PDE9A | 638 | −0.1238 | 0 | 0.2265 | 0 | −0.0849 |
| VSIG2 | 639 | −0.0998 | 0.1561 | 0.5903 | −0.1277 | −0.0855 |
| EPHB3 | 640 | 0 | 0.0699 | 0 | 0.0728 | −0.0879 |
| UGT2B15 | 641 | 0 | 0.0291 | 0.2061 | 0 | −0.0889 |
| SCIN | 642 | 0 | 0 | 0.2905 | −0.0701 | −0.0909 |
| GCG | 643 | −0.0333 | 0 | 0.6672 | 0 | −0.0915 |
| EIF5A | 644 | 0.2584 | 0 | 0 | 0 | −0.0957 |
| SLC7A11 | 645 | 0.2432 | 0 | −0.0564 | 0 | −0.0965 |
| DEFA6 | 646 | −0.2071 | 0.2699 | 0 | 0.1026 | −0.0967 |
| HSPA4L | 647 | 0.4777 | 0 | −0.1142 | 0 | −0.0977 |
| NR5A2 | 648 | 0 | 0 | 0.2702 | 0 | −0.0978 |
| FAM46C | 649 | 0.058 | 0.156 | 0.0039 | −0.1788 | −0.0981 |
| MUC1 | 650 | 0.1133 | 0.2233 | 0 | −0.2325 | −0.0986 |
| SEMG1 | 651 | 0.2915 | 0 | 0 | −0.0107 | −0.0988 |
| CA12 | 652 | 0 | 0.0193 | 0.1852 | 0 | −0.1029 |
| SSTR1 | 653 | 0 | 0.2208 | 0 | 0 | −0.1029 |
| PBLD | 654 | −0.1626 | 0 | 0.3327 | 0.0387 | −0.1034 |
| SDR16C5 | 655 | 0.1124 | 0.365 | 0 | −0.2206 | −0.104 |
| CA1 | 656 | −0.1556 | −0.106 | 1.1648 | 0 | −0.1047 |
| SLITRK6 | 657 | 0 | 0.6746 | 0 | −0.0671 | −0.1053 |
| C15orf48 | 658 | 0 | 0 | 0.1913 | −0.0205 | −0.1058 |
| RETNLB | 659 | −0.1708 | 0.6788 | 0 | −0.0034 | −0.1068 |
| REG1B | 660 | 0 | 0.265 | 0.1291 | −0.0772 | −0.1068 |
| GPR126 | 661 | 0.3516 | 0.0502 | 0 | −0.1412 | −0.1088 |
| NAT2 | 662 | −0.1429 | 0.0137 | 0.0234 | 0.02 | −0.1099 |
| RNF186 | 663 | 0 | 0.0295 | 0 | 0 | −0.1105 |
| PSAT1 | 664 | 0.1191 | 0 | −0.1161 | 0 | −0.1114 |
| OLFM4 | 665 | −0.1798 | 0 | 0.2002 | 0 | −0.1118 |
| A1CF | 666 | −0.4783 | 0 | 0.0926 | 0.3806 | −0.112 |
| PTGER4 | 667 | 0 | 0.1113 | 0.0641 | 0 | −0.113 |
| AP1S3 | 668 | 0.1181 | 0 | 0 | 0 | −0.1136 |
| SPINK5 | 669 | 0 | 0 | 0.4997 | 0 | −0.1147 |
| CWH43 | 670 | −0.0661 | 0.1188 | 0.0912 | 0 | −0.1153 |
| TRPA1 | 671 | −0.0318 | 0.2025 | 0.0203 | 0 | −0.1164 |
| GCNT3 | 672 | 0.1215 | 0.0448 | 0.1736 | −0.2489 | −0.1169 |
| LAMA1 | 673 | 0 | 0.1677 | 0.2283 | −0.0487 | −0.118 |
| KCNK1 | 674 | 0.1194 | 0.0547 | 0 | −0.0584 | −0.1184 |
| MUC5AC | 675 | 0.1499 | 0.1813 | 0 | −0.0307 | −0.1207 |
| MYRIP | 676 | −0.1778 | 0 | 0 | 0.3282 | −0.1215 |
| FOXA1 | 677 | 0.1204 | 0.0106 | 0 | 0 | −0.1229 |
| C9orf152 | 678 | 0 | 0.1578 | 0 | 0 | −0.123 |
| STX19 | 679 | 0 | 0 | 0 | 0.0071 | −0.124 |
| CTSE | 680 | 0.1232 | 0.3417 | 0 | −0.2717 | −0.1256 |
| PARM1 | 681 | 0 | 0 | 0.0774 | 0 | −0.1265 |
| SI | 682 | 0 | 0 | 0.7566 | −0.1968 | −0.1266 |
| TSPAN12 | 683 | 0 | 0 | 0 | 0.1291 | −0.1268 |
| AQP3 | 684 | 0 | 0.55 | 0 | −0.1016 | −0.1272 |
| PKIB | 685 | 0 | 0 | 0.5363 | −0.0196 | −0.1285 |
| DHRS9 | 686 | 0 | 0 | 0.6841 | −0.0531 | −0.1287 |
| MEP1A | 687 | −0.4152 | 0 | 0.2711 | 0.2924 | −0.1291 |
| FAM55A | 688 | −0.0896 | 0.0635 | 0.3244 | 0 | −0.1302 |
| APOL6 | 689 | 0.1761 | 0 | 0 | 0 | −0.1318 |
| C10orf99 | 690 | −0.4666 | 0 | 0.2794 | 0.2684 | −0.1355 |
| CEACAM1 | 691 | −0.0758 | 0 | 0.1347 | 0.1253 | −0.1364 |
| IQGAP2 | 692 | 0 | 0.0843 | 0 | −0.0291 | −0.137 |
| HGD | 693 | 0 | 0.1104 | 0.0295 | 0 | −0.1379 |
| FAM110C | 694 | 0 | 0 | 0 | 0.0756 | −0.1389 |
| BCL2L15 | 695 | 0 | 3.00E−04 | 0 | 0 | −0.1409 |
| LOC285628 | 696 | 0.1006 | 0 | 0 | 0 | −0.141 |
| MUC13 | 697 | 0 | 0 | 0.0047 | 0 | −0.1415 |
| SRSF6 | 698 | 0.3681 | 0 | 0 | 0 | −0.1421 |
| MAOA | 699 | 0 | 0.0054 | 0.0645 | 0 | −0.1426 |
| REG3A | 700 | 0 | 0.3642 | 0 | 0 | −0.1431 |
| ADH1C | 701 | −0.0505 | 0 | 0.7086 | 0 | −0.1433 |
| RHBDL2 | 702 | 0 | 0.124 | 0.164 | 0 | −0.1433 |
| RASEF | 703 | 0 | 0.0349 | 0 | 0.0076 | −0.1435 |
| GNE | 704 | 0 | 0.2974 | 0 | −0.1021 | −0.1436 |
| EPB41L4B | 705 | −0.0915 | 0 | 0 | 0.1986 | −0.1437 |
| ELOVL7 | 706 | 0.0731 | 0.0922 | 0 | 0 | −0.145 |
| ID1 | 707 | −0.2755 | 0 | 0 | 0.2997 | −0.1463 |
| BCAS1 | 708 | 0 | 0.2379 | 0.2158 | −0.0024 | −0.1501 |
| PLA2G2A | 709 | 0.2168 | 0.0815 | 0.4598 | −0.486 | −0.1579 |
| FAM3D | 710 | −0.1337 | 0.0915 | 0.0829 | 0 | −0.164 |
| TMEM56 | 711 | 0 | 0 | 0 | 0.0477 | −0.1641 |
| HHLA2 | 712 | 0 | 0 | 0.2692 | 0 | −0.166 |
| GPA33 | 713 | 0 | 0 | 0.0895 | 0 | −0.1674 |
| FAM169A | 714 | 0.114 | 0 | −0.1773 | 0.0082 | −0.1709 |
| L1TD1 | 715 | 0 | 0.5659 | 0 | 0 | −0.1713 |
| HIPK2 | 716 | 0 | 0 | 0 | 0.0459 | −0.173 |
| CDHR5 | 717 | −0.1114 | 0 | 0.4598 | 0.0126 | −0.1746 |
| NCRNA00261 | 718 | 0 | 0.6892 | 0 | −0.0846 | −0.1753 |
| GIPC2 | 719 | 0 | 0 | 0 | 0.1653 | −0.1758 |
| SLC44A4 | 720 | 0 | 0 | 0.1474 | 0 | −0.176 |
| TMEM144 | 721 | 0.0196 | 0 | 0 | 0 | −0.1761 |
| CLRN3 | 722 | −0.0303 | 0.0521 | 0 | 0.0239 | −0.1775 |
| MS4A12 | 723 | −0.2189 | −0.085 | 1.2327 | 0 | −0.1794 |
| DMBT1 | 724 | 0 | 0.1604 | 0.0775 | 0 | −0.1811 |
| KLF4 | 725 | 0 | 0.1714 | 0.1652 | −0.0391 | −0.1811 |
| TYMS | 726 | 0.2779 | 0 | 0 | 0 | −0.1827 |
| TCEA3 | 727 | 0 | 0.0673 | 0.1001 | 0 | −0.1849 |
| REG1A | 728 | 0 | 0.3339 | 0.1229 | −0.106 | −0.1862 |
| O3FAR1 | 729 | 0 | 0.2761 | 0.0131 | −0.1374 | −0.1871 |
| AKR1B10 | 730 | 0 | 0 | 0.4524 | 0 | −0.1894 |
| ZG16B | 731 | 0 | 0.0674 | 0 | 0 | −0.1899 |
| DUOXA2 | 732 | −0.0559 | 0.1986 | 0.0347 | 0 | −0.1909 |
| TSPAN1 | 733 | 0 | 0.0296 | 0.2593 | −0.0498 | −0.1927 |
| CMBL | 734 | 0.025 | 0 | 0 | 0 | −0.1931 |
| LRRC19 | 735 | −0.2406 | 0 | 0.4224 | 0.0842 | −0.1958 |
| CA4 | 736 | −0.1041 | −0.1611 | 1.1584 | 0 | −0.1962 |
| PFKFB2 | 737 | 0 | 0 | 0 | 0.0178 | −0.1963 |
| CA2 | 738 | 0 | 0 | 0.8348 | −0.2319 | −0.1966 |
| MUC5B | 739 | 0.0166 | 0.3267 | 0 | −0.1629 | −0.1967 |
| PBK | 740 | 0.2468 | 0 | −0.0355 | 0 | −0.1979 |
| SGPP2 | 741 | 0.0406 | 0 | 0 | 0 | −0.1984 |
| PDZK1IP1 | 742 | 0 | 0.0371 | 0 | 0 | −0.199 |
| LRRC31 | 743 | −0.1468 | 0.0055 | 0.052 | 0.0762 | −0.1996 |
| HSD17B2 | 744 | 0 | 0 | 0.4486 | −0.0518 | −0.2004 |
| PLAC8 | 745 | 0.0752 | 0 | 0.4226 | −0.2386 | −0.213 |
| FUT3 | 746 | 0 | 0.115 | 0 | 0 | −0.2135 |
| AHCYL2 | 747 | 0 | 0 | 0.1925 | 0 | −0.2145 |
| GALNT7 | 748 | 0 | 0.0897 | 0 | 0 | −0.2155 |
| TFF1 | 749 | 0 | 0.3534 | 0 | −0.0308 | −0.2172 |
| KIAA1324 | 750 | 0 | 0.5516 | 0 | 0 | −0.2217 |
| C2CD4A | 751 | 0.06 | 0.1973 | −0.0763 | 0 | −0.2233 |
| HSD11B2 | 752 | −0.2885 | 0 | 0.2056 | 0.122 | −0.2238 |
| ZG16 | 753 | −0.277 | 0 | 1.2747 | −0.0738 | −0.2259 |
| TMPRSS2 | 754 | 0 | 0 | 0.121 | 0 | −0.2314 |
| LOC100505633 | 755 | 0 | 0 | 0.1534 | 0 | −0.2342 |
| CEACAM7 | 756 | −0.0427 | 0 | 0.7139 | 0 | −0.2346 |
| MUC4 | 757 | 0 | 0.3425 | 0.4273 | −0.3378 | −0.2358 |
| C6orf105 | 758 | 0 | 0.0904 | 0.4878 | −0.1345 | −0.2366 |
| FOXA3 | 759 | 0 | 0.3 | 0 | 0 | −0.2388 |
| CLCA1 | 760 | −0.2813 | 0.4699 | 0.7005 | −0.1336 | −0.2418 |
| DUOX2 | 761 | −0.1636 | 0.2113 | 0.3329 | 0 | −0.2425 |
| PIGR | 762 | 0.0536 | 0.0501 | 0.0738 | −0.0398 | −0.2547 |
| RAB27B | 763 | 0.487 | 0.2877 | 0 | −0.3304 | −0.2581 |
| CASP1 | 764 | 0.2001 | 0 | 0 | 0 | −0.2597 |
| STYK1 | 765 | 0 | 0.0156 | 0.0878 | 0 | −0.2605 |
| AGR3 | 766 | 0.2161 | 0.3804 | 0.0991 | −0.3697 | −0.2605 |
| LOC100505989 | 767 | 0 | 0.0763 | 0.0588 | 0 | −0.2608 |
| SLC4A4 | 768 | 0 | 0 | 0.883 | −0.3218 | −0.2627 |
| CLCA4 | 769 | −0.1036 | −0.0549 | 1.2783 | −0.0098 | −0.2643 |
| SLC39A8 | 770 | 0 | 0.1035 | 0 | 0 | −0.2645 |
| LCN2 | 771 | 0.0018 | 0.116 | 0 | 0 | −0.2709 |
| LIMA1 | 772 | 0 | 0.0672 | 0.0444 | 0 | −0.2767 |
| ITLN1 | 773 | −0.1478 | 0.4826 | 0.7893 | −0.264 | −0.2835 |
| TNFRSF11A | 774 | 0.0938 | 0.1267 | 0 | 0 | −0.2837 |
| SPINK4 | 775 | −0.1155 | 0.7836 | 0.4619 | −0.2607 | −0.2948 |
| AGR2 | 776 | 0.2149 | 0.3838 | 0 | −0.2065 | −0.2962 |
| TC2N | 777 | 0.1365 | 0.1647 | 0 | 0 | −0.3055 |
| CCL28 | 778 | 0 | 0 | 0.3981 | −0.0377 | −0.3062 |
| XDH | 779 | 0 | 0 | 0.2604 | 0 | −0.31 |
| HEPACAM2 | 780 | −0.1912 | 0.6205 | 0.5701 | −0.1608 | −0.3109 |
| SELENBP1 | 781 | −0.2011 | 0.0607 | 0.0439 | 0.1747 | −0.3174 |
| NR3C2 | 782 | 0 | 0.1313 | 0.2677 | −0.0233 | −0.3255 |
| REG4 | 783 | 0.0373 | 0.7826 | 0.273 | −0.5249 | −0.3414 |
| MUC2 | 784 | 0 | 0.5434 | 0.5514 | −0.3675 | −0.3415 |
| ST6GALNAC1 | 785 | 0 | 0.4922 | 0.2987 | −0.0889 | −0.4119 |
| FCGBP | 786 | 0 | 0.6699 | 0.521 | −0.3536 | −0.4409 |

[0076] According to an embodiment of the present invention, preferred gene profile specific to “Transit-amplifying (TA)” type of CRC is shown in Table 3 and more preferred gene profile specific to “Transit-amplifying (TA)” type of CRC is shown in Table 4. The scores are illustrative only and represent expression profiles (tendencies) of listed genes. Positive score means high expression, negative score means low expression and zero means no change in expression.

TABLE 3

| | Inflam- | Goblet- | | | Stem- |
|---|---|---|---|---|---|
| Genes | matory | like | Enterocyte | TA | like |
| LY6G6D | −0.4827 | −0.278 | 0 | 0.645 | 0 |
| EREG | −0.237 | −0.5917 | 0 | 0.5346 | 0 |
| CEL | −0.3331 | −0.2754 | 0 | 0.513 | 0 |
| KRT23 | −0.3977 | −0.1715 | −0.0151 | 0.5018 | 0 |
| ACSL6 | −0.2707 | −0.1914 | 0 | 0.4946 | 0 |
| QPRT | −0.4772 | −0.0355 | 0 | 0.4905 | 0 |
| AXIN2 | −0.5204 | 0 | −0.041 | 0.4693 | 0 |
| ABAT | −0.419 | −0.196 | 0 | 0.4676 | 0 |
| FARP1 | −0.3463 | −0.1333 | 0 | 0.4618 | 0 |
| CELP | −0.2423 | −0.1824 | 0 | 0.4596 | 0 |
| C13orf18 | −0.4561 | −0.1986 | 0 | 0.4594 | 0 |
| HUNK | −0.3014 | 0 | 0 | 0.4551 | 0 |
| PLCB4 | −0.5302 | 0 | 0 | 0.4469 | 0 |
| APCDD1 | −0.3677 | 0 | −0.0421 | 0.4429 | 0 |
| RNF43 | −0.3522 | 0 | −0.0421 | 0.4419 | 0 |
| ASCL2 | −0.2372 | −0.0094 | 0 | 0.4368 | 0 |
| CHN2 | −0.3758 | 0 | 0 | 0.4267 | −0.0047 |
| AREG | −0.1866 | −0.247 | 0 | 0.4157 | 0 |
| PAH | −0.1544 | 0 | 0 | 0.402 | −0.0157 |
| NR1I2 | −0.3957 | 0 | 0 | 0.4 | 0 |
| FREM2 | −0.2196 | 0 | −0.0068 | 0.394 | 0 |
| CTTNBP2 | −0.388 | 0 | 0 | 0.3939 | 0 |
| GRM8 | −0.2247 | 0 | 0 | 0.3892 | −0.0425 |
| GNG4 | −0.2743 | −0.1998 | 0 | 0.3844 | 0 |
| LOC100288092 | −0.2227 | −0.081 | 0 | 0.3836 | 0 |
| PRR15 | −0.2621 | 0 | 0 | 0.3835 | −0.0293 |
| CFTR | −0.263 | −0.0358 | 0 | 0.3797 | 0 |
| BCL11A | −0.2415 | 0 | 0 | 0.3785 | 0 |
| ERP27 | −0.2191 | −0.0036 | 0 | 0.3765 | 0 |
| PLA2G12B | −0.1554 | −0.0835 | 0 | 0.3755 | 0 |
| SPIN3 | −0.3674 | 0 | −0.0715 | 0.3722 | 0 |
| GGH | −0.1254 | 0 | 0 | 0.3714 | −0.0036 |
| CACNA1D | −0.2586 | 0 | 0 | 0.3631 | −0.053 |
| ACE2 | −0.2602 | −0.1158 | 0 | 0.3627 | 0 |
| PTPRO | −0.3785 | −0.0308 | 0 | 0.3621 | 0 |
| MYRIP | −0.2183 | 0 | 0 | 0.3615 | −0.1623 |
| DPEP1 | −0.308 | 0 | −0.0196 | 0.3604 | 0 |
| PROX1 | −0.2279 | 0 | −0.0268 | 0.358 | −0.005 |
| SGK2 | −0.2529 | −0.0333 | 0.0661 | 0.3557 | −0.1121 |
| ZNRF3 | −0.1792 | 0 | −0.094 | 0.3532 | 0 |
| CAB39L | −0.3164 | −0.1037 | 0 | 0.353 | 0 |
| DDC | −0.091 | 0 | 0 | 0.3513 | −0.1222 |
| LRRC2 | −0.2247 | 0 | 0 | 0.3495 | 0 |
| REEP1 | −0.2705 | −0.1763 | 0 | 0.3453 | 0 |
| ID1 | −0.316 | 0 | 0 | 0.333 | −0.1871 |
| CYP2B6 | −0.1431 | −0.0106 | 0 | 0.3306 | 0 |
| LAMP2 | −0.1881 | −0.0428 | 0 | 0.3305 | 0 |
| PPP1R14C | −0.2419 | −0.0149 | 0 | 0.3242 | 0 |
| CBX5 | −0.2854 | 0 | 0 | 0.3214 | −0.0042 |
| NOX1 | −0.302 | 0 | 0 | 0.3212 | 0 |
| SLC22A3 | −0.1457 | 0 | −0.1395 | 0.3202 | 0 |
| TCFL5 | −0.0319 | −0.0874 | −0.0236 | 0.3179 | 0 |
| SATB2 | −0.196 | −0.1106 | 0 | 0.3163 | 0 |
| AREGB | −0.1052 | −0.0588 | 0 | 0.3124 | 0 |
| AZGP1 | −0.066 | 0 | 0 | 0.3118 | 0 |
| TMEM150C | −0.2715 | 0 | 0 | 0.3072 | 0 |
| LY75 | −0.0015 | −0.0399 | 0 | 0.3045 | −0.0527 |
| LOC647979 | −0.2257 | 0 | 0 | 0.3023 | 0 |
| LOC100128822 | −0.1782 | 0 | 0 | 0.3022 | 0 |

TABLE 4

| | | | | | Stem- |
|---|---|---|---|---|---|
| Genes | Inflammatory | Goblet-like | Enterocyte | TA | like |
| LY6G6D | −0.4827 | −0.278 | 0 | 0.645 | 0 |
| EREG | −0.237 | −0.5917 | 0 | 0.5346 | 0 |
| CEL | −0.3331 | −0.2754 | 0 | 0.513 | 0 |
| KRT23 | −0.3977 | −0.1715 | −0.0151 | 0.5018 | 0 |
| ACSL6 | −0.2707 | −0.1914 | 0 | 0.4946 | 0 |
| QPRT | −0.4772 | −0.0355 | 0 | 0.4905 | 0 |
| AXIN2 | −0.5204 | 0 | −0.041 | 0.4693 | 0 |
| ABAT | −0.419 | −0.196 | 0 | 0.4676 | 0 |
| FARP1 | −0.3463 | −0.1333 | 0 | 0.4618 | 0 |
| CELP | −0.2423 | −0.1824 | 0 | 0.4596 | 0 |
| C13orf18 | −0.4561 | −0.1986 | 0 | 0.4594 | 0 |
| HUNK | −0.3014 | 0 | 0 | 0.4551 | 0 |
| PLCB4 | −0.5302 | 0 | 0 | 0.4469 | 0 |
| APCDD1 | −0.3677 | 0 | −0.0421 | 0.4429 | 0 |
| RNF43 | −0.3522 | 0 | −0.0421 | 0.4419 | 0 |
| ASCL2 | −0.2372 | −0.0094 | 0 | 0.4368 | 0 |
| CHN2 | −0.3758 | 0 | 0 | 0.4267 | −0.0047 |
| AREG | −0.1866 | −0.247 | 0 | 0.4157 | 0 |
| PAH | −0.1544 | 0 | 0 | 0.402 | −0.0157 |
| NR1I2 | −0.3957 | 0 | 0 | 0.4 | 0 |

[0077] In a further embodiment of the present invention, preferred gene profile specific to “Stem-like” type of CRC are shown in Table 5 and more preferred gene profile specific to “Stem-like” type of CRC are shown in Table 6. The scores are illustrative only and represent expression profiles (tendencies) of listed genes. Positive score means high expression, negative score means low expression and zero means no change in expression.

TABLE 5

| | | Goblet- | | | |
|---|---|---|---|---|---|
| Genes | Inflammatory | like | Enterocyte | TA | Stem-like |
| SFRP2 | 0 | −0.3237 | −0.0307 | −0.2639 | 0.9198 |
| MGP | −0.0156 | −0.2349 | 0 | −0.1809 | 0.7443 |
| COL10A1 | 0 | −0.2045 | −0.1689 | −0.1652 | 0.7253 |
| MSRB3 | 0 | −0.2417 | 0 | −0.1456 | 0.7171 |
| CYP1B1 | 0 | −0.0613 | −0.1731 | −0.1959 | 0.6919 |
| FNDC1 | 0 | −0.2043 | −0.0783 | −0.0828 | 0.6894 |
| SFRP4 | 0 | −0.1449 | −0.1787 | 0 | 0.6878 |
| CCDC80 | 0 | −0.2075 | 0 | −0.1757 | 0.6772 |
| SPOCK1 | 0 | −0.1981 | −0.0783 | −0.1568 | 0.6726 |
| THBS2 | 0 | −0.2384 | −0.1937 | −0.0919 | 0.6622 |
| MFAP5 | −0.038 | −0.1853 | 0 | −0.0968 | 0.6545 |
| ASPN | 0 | −0.1971 | −0.0474 | −0.0832 | 0.6523 |
| TNS1 | 0 | −0.251 | 0 | −0.1417 | 0.6479 |
| TAGLN | 0 | −0.2068 | 0 | −0.1631 | 0.6451 |
| COMP | 0 | −0.0213 | −0.2292 | 0 | 0.6221 |
| NTM | 0 | −0.156 | −0.1646 | −0.1041 | 0.6122 |
| HOPX | 0 | −0.1899 | −0.0595 | −0.1683 | 0.6045 |
| AEBP1 | 0 | −0.1322 | −0.0542 | −0.1414 | 0.596 |
| PLN | 0 | −0.1551 | 0 | −0.1516 | 0.594 |
| FBN1 | 0 | −0.1951 | 0 | −0.1472 | 0.5937 |
| ANTXR1 | 0 | −0.1536 | 0 | −0.1127 | 0.5877 |
| MIR100HG | 0 | −0.1035 | 0 | −0.0684 | 0.5838 |
| PCDH7 | 0 | −0.1446 | 0 | −0.1002 | 0.5825 |
| DDR2 | 0 | −0.1712 | 0 | −0.1708 | 0.5791 |
| MYL9 | −0.0079 | −0.2503 | 0 | 0 | 0.5767 |
| FERMT2 | 0 | −0.1628 | 0 | −0.0848 | 0.5699 |
| VCAN | 0 | −0.1243 | 0 | −0.1048 | 0.557 |
| CDH11 | 0 | −0.0178 | 0 | −0.0787 | 0.5535 |
| FAP | 0 | −0.0726 | −0.1104 | −0.1726 | 0.544 |
| COL3A1 | 0 | −0.1255 | −0.0761 | −0.145 | 0.5437 |
| COL1A2 | 0 | −0.1251 | 0 | −0.1194 | 0.541 |
| TIMP2 | 0 | −0.1668 | 0 | −0.1667 | 0.5372 |
| BGN | 0 | −0.1576 | −0.0846 | −0.0992 | 0.5313 |
| GLT8D2 | 0 | −0.1068 | 0 | −0.1186 | 0.5301 |
| DCN | 0 | −0.1975 | 0 | −0.1426 | 0.5282 |
| FABP4 | 0 | −0.0557 | −0.0133 | −0.0637 | 0.5223 |
| FBLN1 | −0.0055 | −0.1684 | 0 | −0.0536 | 0.5197 |
| EFEMP1 | 0 | −0.1512 | 0 | −0.0935 | 0.5179 |
| VGLL3 | 0 | −0.1314 | −0.0875 | −0.1076 | 0.5177 |
| SPARC | 0 | −0.1647 | 0 | −0.0886 | 0.5134 |
| ITGBL1 | 0 | −0.084 | −0.162 | 0 | 0.5123 |
| AKAP12 | 0 | −0.1466 | 0 | −0.0646 | 0.5113 |
| INHBA | 0 | −0.0576 | −0.1452 | −0.0939 | 0.5113 |
| COL5A2 | 0 | −0.1516 | −0.0767 | −0.0742 | 0.508 |
| ISLR | 0 | −0.2185 | 0 | −0.0207 | 0.5012 |
| STON1 | 0 | −0.1002 | 0 | −0.0241 | 0.4967 |
| NOX4 | 0 | −0.0543 | −0.2136 | −0.0344 | 0.4961 |
| ECM2 | 0 | −0.0213 | −0.1591 | 0 | 0.4897 |
| LHFP | 0 | −0.0889 | 0 | −0.0575 | 0.4882 |
| SERPINF1 | 0 | −0.1386 | 0 | −0.1229 | 0.4827 |
| NNMT | 0.0158 | −0.014 | 0 | −0.2425 | 0.4801 |
| PTGIS | −0.0048 | −0.0911 | 0 | 0 | 0.4753 |
| MYLK | 0 | −0.1963 | 0 | −0.0459 | 0.4733 |
| MAP1B | 0 | −0.0398 | 0 | −0.0155 | 0.4723 |
| CALD1 | 0 | −0.1353 | 0 | −0.0784 | 0.4712 |
| GREM1 | 0 | −0.2299 | 0 | −0.2345 | 0.4697 |
| COL5A1 | 0 | −0.0655 | 0 | −0.1038 | 0.4643 |
| CNN1 | 0 | −0.0833 | 0 | −0.0431 | 0.4586 |
| TIMP3 | 0 | −0.3474 | 0 | 0 | 0.4561 |
| COL6A2 | 0 | −0.1303 | 0 | −0.2002 | 0.4545 |
| ZEB1 | 0 | −0.1147 | 0 | −0.021 | 0.4529 |
| PPAPDC1A | 0 | −0.0298 | −0.1981 | −0.0236 | 0.4488 |
| OLFML2B | 0 | −0.0555 | −0.1035 | −0.0691 | 0.4468 |
| HTRA1 | 0 | −0.0174 | −0.0398 | −0.0382 | 0.446 |
| CXCL12 | 0 | −0.1121 | 0 | −0.1192 | 0.4437 |
| DPYSL3 | 0 | 0 | −0.1589 | −0.0235 | 0.4429 |
| PDGFC | 0 | 0 | −0.0047 | −0.0611 | 0.4418 |
| COL6A3 | 0 | −0.1477 | 0 | −0.1135 | 0.4412 |
| COL1A1 | 0 | −0.1544 | −0.0401 | −0.0656 | 0.4386 |
| MYH11 | −0.1148 | −0.0855 | 0 | 0 | 0.4349 |
| AOC3 | 0 | −0.0871 | 0 | −0.0998 | 0.4342 |
| SPARCL1 | 0 | −0.1426 | 0 | −0.1981 | 0.4337 |
| COL12A1 | 0 | 0 | −0.0304 | −0.052 | 0.4335 |
| PHLDB2 | 0 | 0 | 0 | −0.2135 | 0.4252 |
| TPM2 | 0 | −0.1578 | 0 | 0 | 0.4211 |
| TGFB1I1 | 0 | 0 | 0 | −0.0459 | 0.4176 |
| MITF | 0 | −0.0391 | −0.0183 | −0.1459 | 0.4176 |
| GPC6 | 0 | −0.1575 | 0 | −0.0883 | 0.4147 |
| MMP2 | 0 | −0.0659 | 0 | −0.1281 | 0.4117 |
| FIBIN | 0 | −0.0109 | −0.0755 | 0 | 0.4042 |
| TMEM47 | 0 | −0.1747 | 0 | 0 | 0.4029 |
| IGFBP5 | 0 | −0.2509 | 0 | −0.0818 | 0.4019 |
| MXRA5 | 0 | −0.0623 | −0.0753 | −0.0343 | 0.4002 |
| EPYC | 0 | 0 | −0.1321 | 0 | 0.3959 |
| COL15A1 | 0 | −0.1229 | 0 | −0.1803 | 0.3944 |
| LMOD1 | 0 | −0.0425 | 0 | 0 | 0.3918 |
| FN1 | 0 | −0.2329 | −0.1076 | 0 | 0.3918 |
| DPT | 0 | −0.0621 | 0 | 0 | 0.3875 |
| TWIST1 | 0 | −0.0737 | 0 | −0.025 | 0.383 |
| SDC2 | 0 | −0.1134 | 0 | 0 | 0.3813 |
| FLRT2 | 0 | −0.0736 | 0 | −0.0084 | 0.3785 |
| LOXL1 | 0 | 0 | −0.0529 | −0.1304 | 0.378 |
| SSPN | 0 | 0 | 0 | −0.0767 | 0.3766 |
| MAB21L2 | 0 | −0.1029 | 0 | −0.0181 | 0.3766 |
| CTSK | 0 | −0.1202 | 0 | −0.0744 | 0.3744 |
| WWTR1 | 0 | −0.2317 | 0 | −0.0362 | 0.3733 |
| CYBRD1 | 0 | −0.0729 | 0 | −0.0995 | 0.3698 |
| SYNM | −0.0337 | −0.0625 | 0 | 0 | 0.3631 |
| SNAI2 | 0 | −0.0809 | 0 | −0.0788 | 0.3621 |
| DES | 0 | −0.0091 | 0 | 0 | 0.3555 |
| IGF1 | −0.0545 | −0.0135 | 0 | 0 | 0.3541 |
| TNC | 0 | −0.1523 | 0 | −0.1472 | 0.3536 |
| GUCY1A3 | 0 | −0.1738 | 0 | −0.0524 | 0.3485 |
| GULP1 | 0 | −0.1608 | 0 | −0.0069 | 0.3466 |
| AHNAK2 | 0 | 0 | −0.1033 | −0.0605 | 0.3429 |
| ACTG2 | −0.0116 | −0.0764 | 0 | −0.0126 | 0.3424 |
| KAL1 | 0 | −0.0134 | −0.0873 | −0.0238 | 0.3335 |
| FLNA | 0 | −0.1291 | 0 | 0 | 0.3331 |
| CYR61 | 0 | −0.0167 | 0 | −0.1405 | 0.3302 |
| RBMS1 | 0 | −0.3082 | 0 | 0 | 0.3235 |
| SMARCA1 | 0 | 0 | −0.0933 | 0 | 0.3205 |
| MMP11 | 0 | −0.0637 | 0 | 0 | 0.3058 |
| SRPX | 0 | −0.0028 | 0 | −0.0784 | 0.3017 |
| EDNRA | 0 | −0.1676 | −0.0174 | 0 | 0.301 |
| THBS1 | 0 | −0.2428 | 0 | 0 | 0.3 |

TABLE 6

| | | Goblet- | | | |
|---|---|---|---|---|---|
| Genes | Inflammatory | like | Enterocyte | TA | Stem-like |
| SFRP2 | 0 | −0.3237 | −0.0307 | −0.2639 | 0.9198 |
| MGP | −0.0156 | −0.2349 | 0 | −0.1809 | 0.7443 |
| COL10A1 | 0 | −0.2045 | −0.1689 | −0.1652 | 0.7253 |
| MSRB3 | 0 | −0.2417 | 0 | −0.1456 | 0.7171 |
| CYP1B1 | 0 | −0.0613 | −0.1731 | −0.1959 | 0.6919 |
| FNDC1 | 0 | −0.2043 | −0.0783 | −0.0828 | 0.6894 |
| SFRP4 | 0 | −0.1449 | −0.1787 | 0 | 0.6878 |
| CCDC80 | 0 | −0.2075 | 0 | −0.1757 | 0.6772 |
| SPOCK1 | 0 | −0.1981 | −0.0783 | −0.1568 | 0.6726 |
| THBS2 | 0 | −0.2384 | −0.1937 | −0.0919 | 0.6622 |
| MFAP5 | −0.038 | −0.1853 | 0 | −0.0968 | 0.6545 |
| ASPN | 0 | −0.1971 | −0.0474 | −0.0832 | 0.6523 |
| TNS1 | 0 | −0.251 | 0 | −0.1417 | 0.6479 |
| TAGLN | 0 | −0.2068 | 0 | −0.1631 | 0.6451 |
| COMP | 0 | −0.0213 | −0.2292 | 0 | 0.6221 |
| NTM | 0 | −0.156 | −0.1646 | −0.1041 | 0.6122 |
| HOPX | 0 | −0.1899 | −0.0595 | −0.1683 | 0.6045 |
| AEBP1 | 0 | −0.1322 | −0.0542 | −0.1414 | 0.596 |
| PLN | 0 | −0.1551 | 0 | −0.1516 | 0.594 |
| FBN1 | 0 | −0.1951 | 0 | −0.1472 | 0.5937 |
| ANTXR1 | 0 | −0.1536 | 0 | −0.1127 | 0.5877 |
| MIR100HG | 0 | −0.1035 | 0 | −0.0684 | 0.5838 |
| PCDH7 | 0 | −0.1446 | 0 | −0.1002 | 0.5825 |
| DDR2 | 0 | −0.1712 | 0 | −0.1708 | 0.5791 |
| MYL9 | −0.0079 | −0.2503 | 0 | 0 | 0.5767 |
| FERMT2 | 0 | −0.1628 | 0 | −0.0848 | 0.5699 |
| VCAN | 0 | −0.1243 | 0 | −0.1048 | 0.557 |
| CDH11 | 0 | −0.0178 | 0 | −0.0787 | 0.5535 |
| FAP | 0 | −0.0726 | −0.1104 | −0.1726 | 0.544 |
| COL3A1 | 0 | −0.1255 | −0.0761 | −0.145 | 0.5437 |
| COL1A2 | 0 | −0.1251 | 0 | −0.1194 | 0.541 |
| TIMP2 | 0 | −0.1668 | 0 | −0.1667 | 0.5372 |
| BGN | 0 | −0.1576 | −0.0846 | −0.0992 | 0.5313 |
| GLT8D2 | 0 | −0.1068 | 0 | −0.1186 | 0.5301 |
| DCN | 0 | −0.1975 | 0 | −0.1426 | 0.5282 |
| FABP4 | 0 | −0.0557 | −0.0133 | −0.0637 | 0.5223 |
| FBLN1 | −0.0055 | −0.1684 | 0 | −0.0536 | 0.5197 |
| EFEMP1 | 0 | −0.1512 | 0 | −0.0935 | 0.5179 |
| VGLL3 | 0 | −0.1314 | −0.0875 | −0.1076 | 0.5177 |
| SPARC | 0 | −0.1647 | 0 | −0.0886 | 0.5134 |
| ITGBL1 | 0 | −0.084 | −0.162 | 0 | 0.5123 |
| AKAP12 | 0 | −0.1466 | 0 | −0.0646 | 0.5113 |
| INHBA | 0 | −0.0576 | −0.1452 | −0.0939 | 0.5113 |
| COL5A2 | 0 | −0.1516 | −0.0767 | −0.0742 | 0.508 |
| ISLR | 0 | −0.2185 | 0 | −0.0207 | 0.5012 |
| STON1 | 0 | −0.1002 | 0 | −0.0241 | 0.4967 |
| NOX4 | 0 | −0.0543 | −0.2136 | −0.0344 | 0.4961 |
| ECM2 | 0 | −0.0213 | −0.1591 | 0 | 0.4897 |
| LHFP | 0 | −0.0889 | 0 | −0.0575 | 0.4882 |
| SERPINF1 | 0 | −0.1386 | 0 | −0.1229 | 0.4827 |
| NNMT | 0.0158 | −0.014 | 0 | −0.2425 | 0.4801 |
| PTGIS | −0.0048 | −0.0911 | 0 | 0 | 0.4753 |
| MYLK | 0 | −0.1963 | 0 | −0.0459 | 0.4733 |
| MAP1B | 0 | −0.0398 | 0 | −0.0155 | 0.4723 |
| CALD1 | 0 | −0.1353 | 0 | −0.0784 | 0.4712 |
| GREM1 | 0 | −0.2299 | 0 | −0.2345 | 0.4697 |
| COL5A1 | 0 | −0.0655 | 0 | −0.1038 | 0.4643 |
| CNN1 | 0 | −0.0833 | 0 | −0.0431 | 0.4586 |
| TIMP3 | 0 | −0.3474 | 0 | 0 | 0.4561 |
| COL6A2 | 0 | −0.1303 | 0 | −0.2002 | 0.4545 |
| ZEB1 | 0 | −0.1147 | 0 | −0.021 | 0.4529 |
| PPAPDC1A | 0 | −0.0298 | −0.1981 | −0.0236 | 0.4488 |
| OLFML2B | 0 | −0.0555 | −0.1035 | −0.0691 | 0.4468 |
| HTRA1 | 0 | −0.0174 | −0.0398 | −0.0382 | 0.446 |
| CXCL12 | 0 | −0.1121 | 0 | −0.1192 | 0.4437 |
| DPYSL3 | 0 | 0 | −0.1589 | −0.0235 | 0.4429 |
| PDGFC | 0 | 0 | −0.0047 | −0.0611 | 0.4418 |
| COL6A3 | 0 | −0.1477 | 0 | −0.1135 | 0.4412 |
| COL1A1 | 0 | −0.1544 | −0.0401 | −0.0656 | 0.4386 |
| MYH11 | −0.1148 | −0.0855 | 0 | 0 | 0.4349 |
| AOC3 | 0 | −0.0871 | 0 | −0.0998 | 0.4342 |
| SPARCL1 | 0 | −0.1426 | 0 | −0.1981 | 0.4337 |
| COL12A1 | 0 | 0 | −0.0304 | −0.052 | 0.4335 |
| PHLDB2 | 0 | 0 | 0 | −0.2135 | 0.4252 |
| TPM2 | 0 | −0.1578 | 0 | 0 | 0.4211 |
| TGFB1I1 | 0 | 0 | 0 | −0.0459 | 0.4176 |
| MITF | 0 | −0.0391 | −0.0183 | −0.1459 | 0.4176 |
| GPC6 | 0 | −0.1575 | 0 | −0.0883 | 0.4147 |
| MMP2 | 0 | −0.0659 | 0 | −0.1281 | 0.4117 |
| FIBIN | 0 | −0.0109 | −0.0755 | 0 | 0.4042 |
| TMEM47 | 0 | −0.1747 | 0 | 0 | 0.4029 |
| IGFBP5 | 0 | −0.2509 | 0 | −0.0818 | 0.4019 |
| MXRA5 | 0 | −0.0623 | −0.0753 | −0.0343 | 0.4002 |

[0078] In a further embodiment of the present invention, preferred gene profile specific to “Inflammatory” type of CRC are shown in Table 7 and more preferred gene profile specific to “Inflammatory” type of CRC are shown in Table 8. The scores are illustrative only and represent expression profiles (tendencies) of listed genes. Positive score means high expression, negative score means low expression and zero means no change in expression.

TABLE 7

| | | Goblet- | | | |
|---|---|---|---|---|---|
| Genes | Inflammatory | like | Enterocyte | TA | Stem-like |
| CXCL13 | 0.6598 | −0.0547 | 0 | −0.3261 | 0 |
| RARRES3 | 0.6349 | 0 | 0 | −0.3114 | −0.0032 |
| IDO1 | 0.623 | 0 | −0.0271 | −0.0666 | −0.0463 |
| GZMA | 0.5844 | 0 | 0 | −0.2481 | −0.0511 |
| CXCL9 | 0.5802 | −0.0267 | −0.0512 | −0.1435 | 0 |
| CXCL10 | 0.5602 | 0 | −0.0101 | −0.1727 | 0 |
| GBP4 | 0.5585 | 0 | −0.021 | −0.0638 | −0.0303 |
| CCL5 | 0.555 | 0 | 0 | −0.2188 | 0 |
| GNLY | 0.5501 | 0 | 0 | −0.0816 | −0.1053 |
| GBP1 | 0.542 | −0.0522 | 0 | −0.1665 | 0 |
| SAMD9L | 0.5309 | 0 | 0 | −0.2992 | 0 |
| GBP5 | 0.5305 | −0.0272 | −0.0609 | −0.0807 | 0 |
| HSPA4L | 0.5182 | 0 | −0.1598 | 0 | −0.1385 |
| BIRC3 | 0.5138 | 0 | 0 | −0.1868 | 0 |
| CXCL11 | 0.5135 | 0 | −0.0231 | −0.124 | 0 |
| FAM26F | 0.4872 | −0.0222 | 0 | −0.1155 | 0 |
| APOBEC3G | 0.4848 | −0.0503 | 0 | −0.1064 | 0 |
| HLA-DPA1 | 0.4643 | 0 | 0 | −0.2218 | 0 |
| STAT1 | 0.4618 | 0 | −0.0287 | −0.0459 | 0 |
| HOXC6 | 0.4614 | 0 | −0.2736 | −0.1476 | 0 |
| HLA-DMA | 0.4523 | 0 | 0 | −0.2243 | 0 |
| BST2 | 0.452 | 0 | 0 | −0.1546 | 0 |
| KYNU | 0.4477 | 0 | −0.1171 | −0.2248 | 0 |
| ZIC2 | 0.4384 | 0 | 0 | −0.1479 | −0.0707 |
| IFIT3 | 0.4373 | −0.0103 | 0 | −0.1593 | 0 |
| AIM2 | 0.4266 | −0.0029 | −0.0266 | 0 | 0 |
| CCL4 | 0.4231 | 0 | 0 | −0.1309 | 0 |
| HLA-DMB | 0.4225 | 0 | 0 | −0.1551 | 0 |
| SRSF6 | 0.4085 | 0 | 0 | 0 | −0.1829 |
| C1QA | 0.3952 | 0 | 0 | −0.2348 | 0 |
| HLA-DRA | 0.3932 | 0 | 0 | −0.2883 | 0 |
| SAMSN1 | 0.3845 | −0.0402 | 0 | −0.2621 | 0 |
| HLA-DPB1 | 0.3808 | 0 | 0 | −0.2387 | 0 |
| IFI44 | 0.3758 | 0 | −0.0372 | −0.1073 | 0 |
| CD74 | 0.3618 | 0 | 0 | −0.1756 | 0 |
| ISG15 | 0.3552 | −0.0342 | 0 | −0.0549 | 0 |
| SLAMF7 | 0.3524 | 0 | 0 | −0.1563 | 0 |
| RPL22L1 | 0.3511 | 0 | −0.1602 | 0 | −0.0111 |
| PSMB9 | 0.344 | 0 | 0 | 0 | −0.0511 |
| LCK | 0.3433 | 0 | 0 | −0.0793 | 0 |
| MICB | 0.3382 | 0 | 0 | −0.0541 | 0 |
| XAF1 | 0.3326 | 0 | 0 | −0.0974 | 0 |
| TRIM22 | 0.3318 | 0 | 0 | −0.2338 | 0 |
| PIWIL1 | 0.3311 | 0 | −0.0683 | 0 | −0.0161 |
| MMP12 | 0.3309 | 0 | 0 | −0.1033 | 0 |
| TLR8 | 0.3273 | 0 | −0.0601 | −0.0645 | 0 |
| FYB | 0.3253 | 0 | 0 | −0.1719 | 0 |
| TNFSF9 | 0.3207 | 0 | −0.08 | 0 | −0.0023 |
| PLA2G7 | 0.3203 | −0.0667 | 0 | −0.0884 | 0 |
| MT2A | 0.317 | 0 | 0 | −0.3213 | 0 |
| IFIT2 | 0.3144 | −0.0687 | 0 | −0.0836 | 0 |
| BAG2 | 0.313 | 0 | 0 | −0.1522 | 0 |
| IGF2BP3 | 0.3078 | 0 | −0.1765 | −0.0041 | 0 |
| LY6E | 0.3066 | −0.0951 | −0.0177 | 0 | 0 |
| TRBC1 | 0.3059 | 0 | 0 | −0.1337 | 0 |
| PMAIP1 | 0.3003 | −0.0328 | −0.2642 | 0 | 0 |

TABLE 8

| | | Goblet- | | | |
|---|---|---|---|---|---|
| Genes | Inflammatory | like | Enterocyte | TA | Stem-like |
| CXCL13 | 0.6598 | −0.0547 | 0 | −0.3261 | 0 |
| RARRES3 | 0.6349 | 0 | 0 | −0.3114 | −0.0032 |
| IDO1 | 0.623 | 0 | −0.0271 | −0.0666 | −0.0463 |
| GZMA | 0.5844 | 0 | 0 | −0.2481 | −0.0511 |
| CXCL9 | 0.5802 | −0.0267 | −0.0512 | −0.1435 | 0 |
| CXCL10 | 0.5602 | 0 | −0.0101 | −0.1727 | 0 |
| GBP4 | 0.5585 | 0 | −0.021 | −0.0638 | −0.0303 |
| CCL5 | 0.555 | 0 | 0 | −0.2188 | 0 |
| GNLY | 0.5501 | 0 | 0 | −0.0816 | −0.1053 |
| GBP1 | 0.542 | −0.0522 | 0 | −0.1665 | 0 |
| SAMD9L | 0.5309 | 0 | 0 | −0.2992 | 0 |
| GBP5 | 0.5305 | −0.0272 | −0.0609 | −0.0807 | 0 |
| HSPA4L | 0.5182 | 0 | −0.1598 | 0 | −0.1385 |
| BIRC3 | 0.5138 | 0 | 0 | −0.1868 | 0 |
| CXCL11 | 0.5135 | 0 | −0.0231 | −0.124 | 0 |
| FAM26F | 0.4872 | −0.0222 | 0 | −0.1155 | 0 |
| APOBEC3G | 0.4848 | −0.0503 | 0 | −0.1064 | 0 |
| HLA-DPA1 | 0.4643 | 0 | 0 | −0.2218 | 0 |
| STAT1 | 0.4618 | 0 | −0.0287 | −0.0459 | 0 |
| HOXC6 | 0.4614 | 0 | −0.2736 | −0.1476 | 0 |
| HLA-DMA | 0.4523 | 0 | 0 | −0.2243 | 0 |
| BST2 | 0.452 | 0 | 0 | −0.1546 | 0 |
| KYNU | 0.4477 | 0 | −0.1171 | −0.2248 | 0 |
| ZIC2 | 0.4384 | 0 | 0 | −0.1479 | −0.0707 |
| IFIT3 | 0.4373 | −0.0103 | 0 | −0.1593 | 0 |
| AIM2 | 0.4266 | −0.0029 | −0.0266 | 0 | 0 |
| CCL4 | 0.4231 | 0 | 0 | −0.1309 | 0 |
| HLA-DMB | 0.4225 | 0 | 0 | −0.1551 | 0 |
| SRSF6 | 0.4085 | 0 | 0 | 0 | −0.1829 |

[0079] In a further embodiment of the present invention, preferred gene profile specific to “Goblet-like” type of CRC are shown in Table 9 and more preferred gene profile specific to “Goblet-like” type of CRC are shown in Table 10. The scores are illustrative only and represent expression profiles (tendencies) of listed genes. Positive score means high expression, negative score means low expression and zero means no change in expression.

TABLE 9

| | | Goblet- | | | |
|---|---|---|---|---|---|
| Genes | Inflammatory | like | Enterocyte | TA | Stem-like |
| SLITRK6 | 0 | 0.7207 | 0 | −0.1004 | −0.1461 |
| PCSK1 | −0.0942 | 0.6432 | 0 | 0 | −0.0982 |
| L1TD1 | 0 | 0.612 | 0 | 0 | −0.2121 |
| KIAA1324 | −0.0184 | 0.5977 | 0 | 0 | −0.2625 |
| AQP3 | 0 | 0.5962 | 0 | −0.1349 | −0.168 |
| TOX | 0 | 0.5824 | 0 | −0.1544 | −0.0849 |
| PCCA | −0.1223 | 0.4963 | 0 | 0 | 0 |
| SERPINA1 | 0 | 0.4894 | 0 | −0.0715 | −0.1033 |
| DEFA5 | −0.2474 | 0.4559 | 0 | 0.0037 | −0.1204 |
| SMAD9 | −0.2885 | 0.4111 | 0 | 0 | 0 |
| REG3A | 0 | 0.4103 | 0 | 0 | −0.1839 |
| DUSP4 | 0.3838 | 0.4023 | −0.2509 | −0.3094 | 0 |
| C8orf84 | 0 | 0.4015 | −0.2297 | 0 | 0 |
| TFF1 | 0 | 0.3995 | 0 | −0.0641 | −0.258 |
| EPHA4 | 0 | 0.3921 | 0 | −0.1083 | 0 |
| MUC4 | 0 | 0.3886 | 0.473 | −0.3711 | −0.2766 |
| CPS1 | 0 | 0.3852 | −0.0506 | −0.0104 | −0.0604 |
| REG1A | 0 | 0.38 | 0.1686 | −0.1393 | −0.227 |
| HSPA2 | −0.0874 | 0.3733 | 0 | −0.1218 | 0 |
| SLAIN1 | 0 | 0.3567 | −0.063 | 0 | 0 |
| FOXA3 | 0 | 0.3462 | 0 | 0 | −0.2796 |
| KLK11 | 0 | 0.3415 | 0 | 0 | 0 |
| PRUNE2 | −0.1432 | 0.3397 | 0 | 0 | 0 |
| TFF3 | −0.0114 | 0.3321 | 0 | 0 | −0.1107 |
| DEFA6 | −0.2476 | 0.316 | 0 | 0.1359 | −0.1375 |
| C11orf93 | 0 | 0.3045 | 0 | 0 | −0.0334 |

TABLE 10

| | | Goblet- | | | |
|---|---|---|---|---|---|
| Genes | Inflammatory | like | Enterocyte | TA | Stem-like |
| SLITRK6 | 0 | 0.7207 | 0 | −0.1004 | −0.1461 |
| PCSK1 | −0.0942 | 0.6432 | 0 | 0 | −0.0982 |
| L1TD1 | 0 | 0.612 | 0 | 0 | −0.2121 |
| KIAA1324 | −0.0184 | 0.5977 | 0 | 0 | −0.2625 |
| AQP3 | 0 | 0.5962 | 0 | −0.1349 | −0.168 |
| TOX | 0 | 0.5824 | 0 | −0.1544 | −0.0849 |
| PCCA | −0.1223 | 0.4963 | 0 | 0 | 0 |
| SERPINA1 | 0 | 0.4894 | 0 | −0.0715 | −0.1033 |
| DEFA5 | −0.2474 | 0.4559 | 0 | 0.0037 | −0.1204 |
| SMAD9 | −0.2885 | 0.4111 | 0 | 0 | 0 |
| REG3A | 0 | 0.4103 | 0 | 0 | −0.1839 |
| DUSP4 | 0.3838 | 0.4023 | −0.2509 | −0.3094 | 0 |
| C8orf84 | 0 | 0.4015 | −0.2297 | 0 | 0 |

[0080] In a further embodiment of the present invention, preferred gene profile specific to “Enterocyte” type of CRC are shown in Table 11 and more preferred gene profile specific to “Enterocyte” type of CRC are shown in Table 12. The scores are illustrative only and represent expression profiles (tendencies) of listed genes. Positive score means high expression, negative score means low expression and zero means no change in expression.

TABLE 11

| | | Goblet- | | | |
|---|---|---|---|---|---|
| Genes | Inflammatory | like | Enterocyte | TA | Stem-like |
| CLCA4 | −0.1441 | −0.101 | 1.324 | −0.0431 | −0.3051 |
| ZG16 | −0.3175 | 0 | 1.3204 | −0.1071 | −0.2667 |
| MS4A12 | −0.2593 | −0.1311 | 1.2784 | 0 | −0.2202 |
| CA1 | −0.196 | −0.1521 | 1.2105 | −0.0218 | −0.1455 |
| CA4 | −0.1446 | −0.2072 | 1.2041 | 0 | −0.237 |
| CLDN8 | −0.1183 | −0.0935 | 0.9693 | −0.014 | −0.0823 |
| SLC4A4 | 0 | 0 | 0.9287 | −0.3551 | −0.3035 |
| CA2 | 0 | 0 | 0.8804 | −0.2652 | −0.2374 |
| SI | 0 | 0 | 0.8022 | −0.2301 | −0.1674 |
| LOC646627 | −0.3265 | 0 | 0.7794 | 0 | −0.109 |
| CEACAM7 | −0.0831 | 0 | 0.7596 | 0 | −0.2754 |
| ADH1C | −0.091 | 0 | 0.7543 | −0.0013 | −0.1841 |
| AQP8 | −0.1371 | −0.0965 | 0.7376 | 0 | −0.1221 |
| DHRS9 | 0 | 0 | 0.7298 | −0.0865 | −0.1695 |
| GCG | −0.0738 | 0 | 0.7129 | −0.0109 | −0.1323 |
| B3GNT7 | −0.0364 | 0 | 0.7118 | −0.0505 | −0.118 |
| PKIB | 0 | −0.0011 | 0.582 | −0.053 | −0.1693 |
| PYY | 0 | 0 | 0.5742 | 0 | −0.1178 |
| MT1M | 0 | 0 | 0.5724 | −0.2344 | 0 |
| TRPM6 | −0.3032 | −0.0554 | 0.5496 | 0 | 0 |
| SPINK5 | 0 | 0 | 0.5453 | 0 | −0.1555 |
| CD177 | 0 | 0 | 0.5419 | −0.0409 | −0.0998 |
| UGT2B17 | −0.1314 | 0 | 0.5002 | 0 | −0.1077 |
| AKR1B10 | −0.0211 | 0 | 0.4981 | 0 | −0.2302 |
| IGJ | 0 | 0 | 0.4954 | −0.1697 | −0.0192 |
| HSD17B2 | 0 | 0 | 0.4943 | −0.0852 | −0.2412 |
| UGT2A3 | −0.2532 | −0.1099 | 0.4822 | 0.1256 | −0.0811 |
| FAM55D | −0.2802 | 0 | 0.4629 | 0 | −0.0429 |
| MFSD4 | −0.0688 | 0 | 0.454 | −0.0054 | −0.0565 |
| PCK1 | −0.1878 | −0.0101 | 0.4506 | 0 | 0 |
| EDN3 | −0.0565 | 0 | 0.4389 | 0 | −0.0176 |
| CPM | 0 | 0 | 0.404 | −0.0779 | 0 |
| SEMA6D | −0.0696 | −0.0805 | 0.3871 | 0 | −0.0194 |
| TMEM37 | −0.0307 | 0 | 0.3738 | 0 | −0.1004 |
| SCARA5 | −0.1256 | 0 | 0.3734 | 0 | −0.0207 |
| METTL7A | −0.2028 | 0 | 0.3536 | 0 | 0 |
| HPGD | 0 | −0.051 | 0.349 | 0 | 0 |
| NR5A2 | 0 | −0.008 | 0.3158 | 0 | −0.1386 |
| HHLA2 | −0.0057 | 0 | 0.3149 | 0 | −0.2068 |
| CLDN23 | 0 | −0.0834 | 0.3063 | 0 | −0.0148 |
| XDH | 0 | 0 | 0.3061 | 0 | −0.3508 |
| LGALS2 | 0 | 0 | 0.3059 | −0.0276 | −0.0821 |

TABLE 12

| | | Goblet- | | | |
|---|---|---|---|---|---|
| Genes | Inflammatory | like | Enterocyte | TA | Stem-like |
| CLCA4 | −0.1441 | −0.101 | 1.324 | −0.0431 | −0.3051 |
| ZG16 | −0.3175 | 0 | 1.3204 | −0.1071 | −0.2667 |
| MS4A12 | −0.2593 | −0.1311 | 1.2784 | 0 | −0.2202 |
| CA1 | −0.196 | −0.1521 | 1.2105 | −0.0218 | −0.1455 |
| CA4 | −0.1446 | −0.2072 | 1.2041 | 0 | −0.237 |
| CLDN8 | −0.1183 | −0.0935 | 0.9693 | −0.014 | −0.0823 |
| SLC4A4 | 0 | 0 | 0.9287 | −0.3551 | −0.3035 |
| CA2 | 0 | 0 | 0.8804 | −0.2652 | −0.2374 |
| SI | 0 | 0 | 0.8022 | −0.2301 | −0.1674 |
| LOC646627 | −0.3265 | 0 | 0.7794 | 0 | −0.109 |
| CEACAM7 | −0.0831 | 0 | 0.7596 | 0 | −0.2754 |
| ADH1C | −0.091 | 0 | 0.7543 | −0.0013 | −0.1841 |
| AQP8 | −0.1371 | −0.0965 | 0.7376 | 0 | −0.1221 |
| DHRS9 | 0 | 0 | 0.7298 | −0.0865 | −0.1695 |
| GCG | −0.0738 | 0 | 0.7129 | −0.0109 | −0.1323 |
| B3GNT7 | −0.0364 | 0 | 0.7118 | −0.0505 | −0.118 |
| PKIB | 0 | −0.0011 | 0.582 | −0.053 | −0.1693 |
| PYY | 0 | 0 | 0.5742 | 0 | −0.1178 |
| MT1M | 0 | 0 | 0.5724 | −0.2344 | 0 |
| TRPM6 | −0.3032 | −0.0554 | 0.5496 | 0 | 0 |
| SPINK5 | 0 | 0 | 0.5453 | 0 | −0.1555 |
| CD177 | 0 | 0 | 0.5419 | −0.0409 | −0.0998 |
| UGT2B17 | −0.1314 | 0 | 0.5002 | 0 | −0.1077 |
| AKR1B10 | −0.0211 | 0 | 0.4981 | 0 | −0.2302 |
| IGJ | 0 | 0 | 0.4954 | −0.1697 | −0.0192 |
| HSD17B2 | 0 | 0 | 0.4943 | −0.0852 | −0.2412 |
| UGT2A3 | −0.2532 | −0.1099 | 0.4822 | 0.1256 | −0.0811 |
| FAM55D | −0.2802 | 0 | 0.4629 | 0 | −0.0429 |
| MFSD4 | −0.0688 | 0 | 0.454 | −0.0054 | −0.0565 |
| PCK1 | −0.1878 | −0.0101 | 0.4506 | 0 | 0 |
| EDN3 | −0.0565 | 0 | 0.4389 | 0 | −0.0176 |
| CPM | 0 | 0 | 0.404 | −0.0779 | 0 |

[0081] In FIG. 1A, CRC samples are arranged by NMF classes in a ‘heatmap’ to illustrate SAM- and PAM identified gene sets unique to each subtype. Comparable profiles were found in six independent open-access datasets (n=399 and Table 1). Notably, four of the five subtypes are present (FIG. 1B) among a panel of CRC cell lines (n=51) and these predictions from CRC cell lines were confirmed using xenograft animal models (n=3, FIG. 6), a finding that could enable evaluation of differential drug sensitivities amongst the subtypes.

[0082] To determine if particular CRC subtypes amongst the five Applicants identified are associated with survival, Applicants evaluated one of the core CRC datasets, GSE14333, which included disease-free survival (DFS; n=197) information. In this dataset, the median follow up among patients without events was 45.1 months. Applicants first evaluated DFS for all the samples irrespective of their treatments (adjuvant radiation and/or chemotherapy) or Duke's stage (combined Duke's stage A or B and considered C separately), the later of which is known to correlate with CRC-specific survival. Applicants found no significant association of subtypes with DFS (p=0.12; log-rank test; FIG. 7A). However, Applicants observed that treatment (p=0.03) and Duke's stage (p=0.0009; log-rank test) were significantly associated with DFS. Applicants also observed that treatment was significantly associated with Duke's stage (p=1.98×10⁻⁴, Fisher's exact test). Since Applicants observed that treatment and Duke's stage were associated with DFS, Applicants examined whether subtype was associated with DFS within subsets defined by these variables. In untreated patients, there was a significant difference amongst the five subtypes in regard to DFS (p=0.0003; log-rank test; n=120). Specifically, stem-like subtype tumors had the shortest DFS (FIG. 1C). On the other hand, there is no significant association between subtypes and DFS (p=0.9; log-rank test; n=77) in the treated patients. Similarly, Applicants did not find significant association between subtypes and DFS either in samples with only Duke's stage A or B (p=0.13; n=119) or those with only Duke's stage C (p=0.7; log-rank test; n=98). Since the total number of events for all the samples was only 43, and it was lower in subtypes, more patient samples are needed to fully elucidate the relationship between subtype and DFS.

[0083] In an embodiment, the present invention provides an in-vitro method for the prognosis of disease-free survival of a subject suffering from colorectal cancer or suspected of suffering therefrom and who has undergone a prior surgical resection of colorectal cancer, the method comprising
[0084] (i) providing a biological sample from said subject comprising colorectal cancer cells or suspected to comprise colorectal cancer cells;
[0085] (ii) measuring the expression level of one or a combination of genes selected from the group of genes listed in Table 2, and
[0086] (iii) classifying said biological sample as “Stem-like”, “Inflammatory”, “Transit-amplifying (TA)”, “Goblet-like” and “Enterocyte” on the basis of the gene expression profile according to Table 2, wherein
   [0087] “Stem-like” type of colorectal cancer indicates poor disease-free survival,
   [0088] “Inflammatory” type of colorectal cancer indicates intermediate disease-free survival,
   [0089] “Transit-amplifying (TA)” type of colorectal cancer indicates good disease-free survival,
   [0090] “Goblet-like” type of colorectal cancer indicates good disease-free survival, and
   [0091] “Enterocyte” type of colorectal cancer indicates intermediate disease-free survival.

[0092] A preferred method according to the invention comprises the combination of genes comprising at least two genes selected from Table 2, or at least five genes selected from Table 2, or at least 10 genes selected from Table 2, or at least 20 genes that are selected from Table 2, more preferred at least 30 genes that are selected from Table 2, more preferred at least 40 genes that are selected from Table 2, more preferred at least 50 genes that are selected from Table 2, more preferred at least 60 genes that are selected from Table 2, more preferred at least 70 genes that are selected from Table 2, more preferred at least 80 genes that are selected from Table 2, more preferred at least 90 genes that are selected from Table 2, more preferred at least 100 genes that are selected from Table 2, more preferred at least 120 genes that are selected from Table 2, more preferred at least 140 genes that are selected from Table 2, more preferred at least 160 genes that are selected from Table 2, more preferred at least 180 genes that are selected from Table 2, more preferred at least 200 genes that are selected from Table 2, more preferred at least 220 genes that are selected from Table 2, more preferred at least 240 genes that are selected from Table 2, more preferred at least 260 genes that are selected from Table 2, more preferred at least 280 genes that are selected from Table 2, more preferred at least 300 genes that are selected from Table 2, more preferred at least 320 genes that are selected from Table 2, more preferred at least 340 genes that are selected from Table 2, more preferred at least 360 genes that are selected from Table 2, more preferred at least 380 genes that are selected from Table 2, more preferred at least 400 genes that are selected from Table 2, more preferred at least 420 genes that are selected from Table 2, more preferred at least 460 genes that are selected from Table 2, more preferred at least 480 genes that are selected from Table 2, more preferred at least 500 genes that are selected from Table 2, more preferred at least 520 genes that are selected from Table 2, more preferred at least 540 genes that are selected from Table 2, more preferred at least 560 genes that are selected from Table 2, more preferred at least 580 genes that are selected from Table 2, more preferred at least 600 genes that are selected from Table 2, more preferred at least 620 genes that are selected from Table 2, more preferred at least 640 genes that are selected from Table 2, more preferred at least 660 genes that are selected from Table 2, more preferred at least 680 genes that are selected from Table 2, more preferred at least 700 genes that are selected from Table 2, more preferred at least 720 genes that are selected from Table 2, more preferred at least 740 genes that are selected from Table 2, more preferred at least 760 genes that are selected from Table 2.

[0093] In a further preferred embodiment, a method of the invention comprises the combination of genes selected from all 786 genes of Table 2.

[0094] More preferably the combination of genes comprises at least two, or at least five, or at least 10, or at least 20, or at least 30, or at least 40 genes selected from Table 2.

[0095] Preferably the combination of genes comprises genes listed in Tables 3, 5, 7, 9 and 11. More preferably the combination of genes comprises genes listed in Tables 4, 6, 8, 10 and 12.

[0096] More preferably the combination of genes comprises LY6G6D, KRT23, CEL, ACSL6, EREG, CFTR, TCN1, PCSK1, NCRNA00261, SPINK4, REG4, MUC2, TFF3, CLCA4, ZG16, CA1, MS4A12, CA4, CXCL13, RARRES3, GZMA, IDO1, CXCL9, SFRP2, COL10A1, CYP1B1, MGP, MSRB3, ZEB1, FLNA.

[0097] Also more preferably the combination of genes comprises SFRP2, ZEB1, RARRES3, CFTR, FLNA, MUC2, TFF3.

[0098] Applicants next sought to compare their method with the standard method of CRC classification, namely microsatellite instability (MSI). Applicants assessed subtype prevalence and distribution in samples from a dataset with known MSI status (GSE13294)⁹ and observed that 94% of the inflammatory subtype were MSI whereas 86% of the TA and 77% of the stem-like subtypes were microsatellite stable (MSS, FIG. 1D). Consistent data were obtained by predicting MSI status for the samples embodied in the identification of our CRC subtypes from the core datasets, using published MSI gene signatures (FIGS. 7B and C). Although there is a strong association of MSI or MSS status with particular subtypes, the transcriptome signatures allow refinement beyond what can be achieved using MSI alone.

[0099] Numerous cell types with specialized functions make up the colon. While colonic stem cells are thought to be the cell of origin for CRC, more differentiated cells may have similar capacity. In light of these considerations, Applicants performed a series of analyses seeking to describe the cellular phenotypes of the observed CRC subtypes. First, Applicants used a published gene signature that discriminates between the normal colon crypt top (where terminally differentiated cells reside) and the normal crypt base (where the undifferentiated or stem cells reside). Using reside). Using the Nearest Template Prediction (NTP) algorithm, Applicants predicted that 98% of the stem-like subtype tumors were significantly associated with the crypt base signature (statistics includes only those samples that were predicted with FDR<0.2). On the other hand, more than 75% of samples from the enterocyte subtype tumors were significantly associated with crypt top by their concordant gene signatures. Intriguingly, 60% of the TA subtype tumor samples have a crypt top signature with low expression of Wnt signaling targets, LGR5 and ASCL2. In contrast, the rest of the TA subtype tumors are significantly associated with the crypt base and exhibit high mRNA expression of the stem/progenitor markers LGR5 and ASCL2 (FIG. 2A and FIG. 8). This suggests that the TA subtype designation may embody two sub-subtypes. The inflammatory and goblet-like subtypes do not have significant associations with either the crypt base or top. Collectively, the most striking and relevant observation from this analysis is the clear association between the stem-like subtype and the crypt base signature.

[0100] To associate CRC subtypes to colon crypt top/base, Applicants used a previously published gene signature (Kosinski, C., et al., Proceedings of the National Academy of Sciences of the United States of America 104, 15418-15423 (2007) of the colon crypt base (see FIG. 2A) together with nearest template prediction (NTP). The analysis confirmed that almost all of the samples from the NMF-identified stem-like subtype were associated with the crypt base signature. This is accomplished by splitting into two groups the up- and down-regulated signature genes to form a dichotomized gene expression template. The similarity of a sample's gene expression profile to the template is computed using a nearest neighbor approach. By random sub-sampling the gene space, NTP estimates a null distribution of similarity coefficients. Then the similarity coefficient obtained using the published gene signature can be compared to the null distribution so as to compute a p-value. The same approach was followed for the association of CRC subtypes to Wnt signaling (FIG. 2A) and FOLFIRI response (FIG. 3F) using specific signatures as described in the main text.

[0101] After performing NTP algorithm based prediction for association of colon-crypt top/base to each sample using a published gene signature that discriminates between the normal colon crypt top and the normal crypt base, Applicants observed statistically significant (only for samples with FDR<0.2) associations as reported in the main text. Here, Applicants are reporting the statistics for all the samples irrespective of the FDR cut-off. Applicants observed that 55% that 55% (n=77) of the stem-like subtype is associated with the crypt base whereas 33% (n=105) of TA, 43% (n=63) of goblet-like and 75% (n=64) of enterocyte subtypes are associated with the crypt top. On the other hand, Applicants observed that more than 80% (n=78) of the inflammatory subtypes have no significant association with either the crypt base or top.

[0102] The colon-crypt base is composed predominantly of stem and progenitor cells, which are known to exhibit high Wnt activity. Thus, Applicants examined Wnt signaling activity in the stem-like subtype by mapping a publicly available gene signature for active Wnt signaling onto the core CRC dataset. Similar to the colon-crypt top/base gene signature comparison, the majority of the stem-like subtype samples were predicted to have high Wnt activity, whereas enterocyte and goblet-like subtypes did not (FIG. 2B). In order to validate this prediction, Applicants then performed an in vitro Wnt activity assay (TOP-flash) on stem-like subtype CRC cell lines and observed that 57% (n=7) of stem-like subtype cell lines exhibited high Wnt activity, as compared to 17% (n=6) among cell lines from the other subtypes (FIG. 2C). To further validate this observation, Applicants performed quantitative (q)RT-PCR and immunofluorescence (IF) assays on a panel of CRC cell lines and xenograft tumors for markers of differentiation or Wnt signaling/stemness. This analysis confirmed that the stem-like subtype was the least differentiated and had the highest expression of Wnt signaling/stem cell markers. The goblet-like subtype, on the other hand, had a well-differentiated marker expression pattern with comparatively low expression of the Wnt markers (FIGS. 2D-G and FIG. 6). These results provide further evidence that the stem-like subtype has a stem or progenitor cell phenotype, and the goblet-like and enterocyte subtype has a differentiated phenotype.

[0103] In order to validate the five subtypes in additional datasets, Applicants mapped the SAM and PAM genes-specific to each subtypes onto each of the preprocessed dataset (RMA in the case of Affymetrix arrays and directly from authors in case of other microarray platforms). Later, Applicants performed consensus-based NMF analysis to identify the number of classes. Further, heatmap was generated using NMF class and SAM and PAM genes.

[0104] Applicants performed DWD based merging of gene expression profile datasets for CRC cell lines from two different sources, for the purpose of increasing the total number of CRC cell lines, after first removing 14 repeated cell lines between the two datasets. Overall, Applicants obtained 51 unique CRC cell lines. The merged cell lines dataset was later merged again with the CRC core dataset, using the DWD based method. Next, Applicants performed NMF based consensus clustering of the merged CRC cell lines and core dataset, seeking to identify subtypes amongst the cell lines (FIG. 6A-B). Applicants identified maximum cophentic coefficient at k=3 and 5. Applicants again selected k=5. Applicants determined that this collection of CRC cell lines represented only 4 subtypes: there was no single cell line that belonged to enterocyte subtype. A few of the duplicate cell lines from different sources showed different subtype identity (probably due to variation in cell culture between different laboratories) after NMF consensus clustering. Applicants tested the subtype of SW620 cell line using RT-PCR analysis and markers of differentiation and stem cells, since this cell line was used for various experiments. Applicants found that SW620 had higher expression of stem cell markers and lower expression of differentiated marker, confirming its stem-like subtype identity (FIG. 6C).

[0105] Applicants examined the relationship between disease-free survival (DFS) and other histopathological information such as Dukes' stage, age, location of tumors (left or right of colon or rectum) and adjuvant treatment in the GSE14333 dataset; see Table 13.

TABLE 13
Clinical/histopathological, subtype and statistical information
for GSE14333 samples.

| | Enterocyte | Goblet-like | Inflammatory | Stem-like | TA |
|---|---|---|---|---|---|
| Age | 66.25 ± 10.17 | 64.52 ± 12.33 | 60.02 ± 12.74 | 61.66 ± 12.27 | 67.13 ± 15.28 |
| Number of | 34 (17.26%) | 31 (15.74%) | 41 (20.8%) | 38 (19.29%) | 53 (26.9%) |
| tumors | | | | | |
| Tumor Duke's | | | | | |
| Stage | | | | | |
| A | 3 (9.1%) | 10 (3.03%) | 3 (9.1%) | 4 (12.12%) | 13 (39.39%) |
| B | 12 (13.95%) | 14 (16.28%) | 20 (23.26%) | 18 (20.93%) | 22 (25.58%) |
| C | 19 (24.36%) | 7 (8.97%) | 18 (23.08%) | 16 (20.51%) | 18 (23.08%) |
| Location of | | | | | |
| tumors | | | | | |
| Left colon | 16 (19.28%) | 9 (10.84%) | 11 (13.25%) | 21 (25.3%) | 26 (31.33%) |
| Right colon | 10 (11.24%) | 20 (22.47%) | 30 (33.71%) | 9 (10.1%) | 20 (22.47%) |
| Rectum | 7 (30.43%) | 2 (8.7%) | 0 | 8 (34.78%) | 6 (26.09%) |
| unknown colon | 1 (0.5%) | 0 | 0 | 0 | 1 (0.5%) |
| Adjuvant | | | | | |
| Radiation | | | | | |
| and/or | | | | | |
| chemotherapy | | | | | |
| Yes | 14 (18.18%) | 13 (16.88%) | 16 (20.78%) | 14 (18.18%) | 20 (25.97%) |
| No | 20 (16.7%) | 18 (20.22%) | 25 (28.1%) | 24 (26.97%) | 23 (37.08%) |

[0106] Applicants censored those patients who were alive without tumor recurrence or dead at last contact. Since subtype is not significantly associated with DFS for all the data, Applicants first used a Cox model to do an adjusted analysis using the variables of Duke's stage or adjuvant treatment. As subtype was not significant in the adjusted analysis, Applicants examined the relationships between subtype and DFS on subsets based on these variables as shown in the main text.

[0107] In this dataset, the median follow up among patients without events (tumor recurrence) was 45.1 months. As already mentioned, Applicants first evaluated DFS for all the samples irrespective of treatment (adjuvant chemotherapy and/or radiotherapy—standard chemotherapy of either single agent 5-fluouracil; 5-FU/capecitabine or 5-FU and oxaliplatin) or Dukes' stage (for analysis, Applicants considered Dukes' stage A and B patients with lymph node negativity together whereas Dukes' stage C patients with lymph node positivity separately), the latter known to correlate with CRC survival. Applicants did not find a significant association between subtype and DFS (p=0.12; FIG. 7A and Table 13). As previously known, Applicants also observed in the current set of samples that treatment (p=0.03) and Dukes' stage (p=0.0009) were significantly associated with DFS. Similarly, Applicants also observed that treatment was significantly associated with Dukes' stage (p=0.0002, Fisher's exact test). Since treatment and Dukes' stage were associated with DFS, Applicants examined whether subtype was associated with DFS within subsets defined by these variables. In untreated patients, there was a significant association between subtypes and DFS (p=0.0003; n=120), with stem-like subtype tumors having the shortest DFS and inflammatory and enterocyte subtypes having the intermediate DFS (FIG. 1C). On the other hand, there was no significant association between subtype and DFS (p=0.9; n=77) in treated patients (FIG. 7B). Similarly, Applicants did not find significant association between subtype and DFS in Dukes' stages A and B (p=0.13; n=119) or in Dukes' stage C (p=0.7; n=98) patients. Applicants also observed that treatment preferentially improved DFS in stem-like subtype patients (though not statistically significant, FIG. 7C).

[0108] The monoclonal anti-EGFR antibody cetuximab is a mainstay of treatment for metastasitc CRC with wild-type Kras; however, cetuximab has failed to show benefit in the adjuvant setting, irrespective of KRAS genotype. Applicants examined the possibility that tumors from our subtypes respond differently to cetuximab. To this end, Applicants correlated their subtypes with cetuximab response using a CRC liver metastases microarray (Khambata-Ford) dataset with matched therapy response from patients (n=80). In this particular dataset, Applicants predicted three of their five CRC subtypes using NMF consensus clustering and CRCassigner genes (FIG. 3A and FIG. 9A). The enterocyte and inflammatory subtypes were not present in this dataset, consistent with our results from another CRC dataset with metastatic information (FIG. 9B) suggesting that they have lower metastatic potential. Applicants observed another unknown subtype in Khambata-Ford dataset that has a gene expression profile which is highly similar to normal liver and may represent tissue contamination and Applicants avoided this subtype in their further analyses (FIG. 3A). Interestingly, Applicants found that 54% (n=26) of patients within the TA subtype had clinical benefit from cetuximab therapy (complete response, partial response and stable disease were considered as beneficial), while only 26% (n=42) of the patients within all the other subtypes had benefit from the drug (FIG. 3A; p<0.05, Fisher Exact test). Although method of predicting cetuximab-response is independent of KRAS mutational status, its predictive value using TA subtype alone is roughly equivalent to that of using wildtype KRAS status (FIGS. 9C-F). Importantly, Applicants also observed TA subtype-specific sensitivity to cetuximab in the panel of CRC cell lines (FIG. 3B and FIG. 9G). While cell lines sensitive to cetuximab were only present within the TA subtype, there was not a uniform response among all the TA cell lines. As such, the cetuximab sensitive and resistant TA subtype tumors and cell lines were henceforth subdivided into two sub-subtypes: cetuximab-sensitive (CS)-TA and cetuximab-resistant (CR)-TA. This further sub-classification brought the total number of CRC subtypes to six.

[0109] In the course of further characterizing the two TA subtypes, Applicants observed that CS-TA tumors have significantly higher expression of epiregulin (EREG) and amphiregulin (AREG), which are epidermal growth factor receptor (EGFR) ligands known to be positive predictors of cetuximab response, compared to CR-TA tumors, using SAM analysis (TA signature; FDR=0.1 and delta=0.8, FIG. 3C and FIGS. 9H-I. Among the three most negative predictors of response to cetuximab (high expression in the CR-TA subtype) was filamin A (FLNA), which regulates the expression and signaling of the cMET receptor (FIG. 3C). Interestingly, high FLNA expression is significantly associated with poor prognosis only within the TA subtype tumors (FIG. 3D), and FLNA expression did not show prognostic differences when samples from all the subtypes were included or when compared by KRAS status (FIGS. 9K-M). Furthermore, CR-TA cell lines were much more sensitive to cMet inhibition than CS-TA cell lines (FIG. 3E). This suggests that screening for TA subtype followed by EREG and FLNA expression would predict response to cetuximab and cMet inhibitor, respectively.

[0110] FIGS. 9D-E illustrate comparable differential responses to cetuximab treatment when restricting the analysis to the TA subtype (p=1.4×10⁻⁶; n=26; FIG. 9D) versus KRAS WT patients (p=1.9×10⁻⁶; n=39; FIG. 9E) using Khambata-Ford dataset. By comparing FIGS. 9F-G, one can gauge the contribution of the TA subtype to the overall differential response to cetuximab: when excluding the TA subtypes, one finds a markedly reduced significance of differential response (p=1.9×10⁻⁴; n=22; FIG. 9F) when compared to the same analysis using all 3 of the identified subtypes (specific to this dataset, p=1.6×10⁻¹⁰; n=48; Figure G) suggesting that patients falling into the TA subtype are largely responsible for the population-wide cetuximab response. For all four of these Kaplan-Meier plots, Applicants excluded samples falling into the “unknown” subtype, which Applicants suspect to have been contaminated by liver metastases, based on expression response signatures (FIG. 3A). Survival statistics for responders (R), evaluated based on modified WHO criteria, were differentiated from non-responders (NR) using a log-rank test.

TABLE 14
List of t test gene signatures that are differentially expressed between
CS-TA and CR-TA Khambata-Ford samples.

| Genes | Response predictor |
|---|---|
| MMP12 | Non Responsive |
| BCL2A1 | Non Responsive |
| ALOX5AP | Non Responsive |
| TREM1 | Non Responsive |
| CYP1B1 | Non Responsive |
| BHLHE41 | Non Responsive |
| EPHA4 | Non Responsive |
| AHNAK2 | Non Responsive |
| DUSP4 | Non Responsive |
| TMPRSS3 | Non Responsive |
| FLNA | Non Responsive |
| PLEKHB1 | Non Responsive |
| TGFB1I1 | Non Responsive |
| DACT1 | Non Responsive |
| CCL2 | Non Responsive |
| AKAP12 | Non Responsive |
| ANO1 | Non Responsive |
| ZFP36L2 | Non Responsive |
| GLS | Non Responsive |
| CCL24 | Non Responsive |
| ASB9 | Non Responsive |
| GALNT7 | Non Responsive |
| HSPA2 | Non Responsive |
| ANKRD10 | Non Responsive |
| CD55 | Non Responsive |
| GCNT3 | Non Responsive |
| SERPINB5 | Non Responsive |
| LAMP2 | Non Responsive |
| CA9 | Non Responsive |
| HLA-DPA1 | Responsive |
| PLA1A | Responsive |
| CTSL2 | Responsive |
| FGFR3 | Responsive |
| GZMB | Responsive |
| PRSS23 | Responsive |
| SGK2 | Responsive |
| FABP4 | Responsive |
| AQP3 | Responsive |
| LRRC31 | Responsive |
| GGH | Responsive |
| AREG | Responsive |
| EREG | Responsive |
| FMO5 | Responsive |
| SPAG1 | Responsive |
| HPGD | Responsive |
| SI | Responsive |
| CLDN8 | Responsive |
| ZG16 | Responsive |
| FAM55D | Responsive |
| TNS1 | Responsive |
| SEMA6D | Responsive |
| DMBT1 | Responsive |
| TRPM6 | Responsive |

[0111] In another embodiment, the present invention provides an in-vitro method for predicting the likelihood that a subject suffering from colorectal cancer or suspected of suffering therefrom and who has undergone a prior surgical resection of colorectal cancer will respond to therapies inhibiting or targeting EGFR, such as cetuximab, and/or cMET, the method comprising
[0112] (i) providing a biological sample from said subject comprising colorectal cancer cells or suspected to comprise colorectal cancer cells;
[0113] (ii) measuring the expression level of one or a combination of genes selected from the group of genes listed in Table 2, and
[0114] (iii) classifying said biological sample as “Stem-like”, “Inflammatory”, “Transit-amplifying (TA)”, “Goblet-like” and “Enterocyte” on the basis of the gene expression profile according to Table 2,
   wherein
[0115] high expressions of AREG and EREG genes and low expressions of BHLHE41, FLNA and PLEKHB1 genes in “Transit-amplifying (TA)” type indicates that at metastatic setting said subject will be responsive to cetuximab treatment and resistant to cMET inhibitor therapy and this signature defines a subtype of TA type designed as “Cetuximab-sensitive transit-amplifying subtype (CS-TA)”.
[0116] low expressions of AREG and EREG genes and high expressions of BHLHE41, FLNA and PLEKHB1 genes in “Transit-amplifying (TA)” type indicates that at metastatic setting said subject will be resistant to cetuximab treatment and will be responsive to cMET inhibitor therapy, and this signature defines a second subtype of TA type named as “Cetuximab-resistant transit-amplifying subtype (CR-TA)”.

[0117] This analysis of cetuximab/cMET response based subtypes forms six integrated gene expression and drug response based subtypes.

[0118] A preferred method according to the invention comprises the combination of genes comprising at least at least five genes selected from Table 2, or at least 10 genes selected from Table 2, or at least 20 genes that are selected from Table 2, more preferred at least 30 genes that are selected from Table 2, more preferred at least 40 genes that are selected from Table 2, more preferred at least 50 genes that are selected from Table 2, more preferred at least 60 genes that are selected from Table 2, more preferred at least 70 genes that are selected from Table 2, more preferred at least 80 genes that are selected from Table 2, more preferred at least 90 genes that are selected from Table 2, more preferred at least 100 genes that are selected from Table 2, more preferred at least 120 genes that are selected from Table 2, more preferred at least 140 genes that are selected from Table 2, more preferred at least 160 genes that are selected from Table 2, more preferred at least 180 genes that are selected from Table 2, more preferred at least 200 genes that are selected from Table 2, more preferred at least 220 genes that are selected from Table 2, more preferred at least 240 genes that are selected from Table 2, more preferred at least 260 genes that are selected from Table 2, more preferred at least 280 genes that are selected from Table 2, more preferred at least 300 genes that are selected from Table 2, more preferred at least 320 genes that are selected from Table 2, more preferred at least 340 genes that are selected from Table 2, more preferred at least 360 genes that are selected from Table 2, more preferred at least 380 genes that are selected from Table 2, more preferred at least 400 genes that are selected from Table 2, more preferred at least 420 genes that are selected from Table 2, more preferred at least 460 genes that are selected from Table 2, more preferred at least 480 genes that are selected from Table 2, more preferred at least 500 genes that are selected from Table 2, more preferred at least 520 genes that are selected from Table 2, more preferred at least 540 genes that are selected from Table 2, more preferred at least 560 genes that are selected from Table 2, more preferred at least 580 genes that are selected from Table 2, more preferred at least 600 genes that are selected from Table 2, more preferred at least 620 genes that are selected from Table 2, more preferred at least 640 genes that are selected from Table 2, more preferred at least 660 genes that are selected from Table 2, more preferred at least 680 genes that are selected from Table 2, more preferred at least 700 genes that are selected from Table 2, more preferred at least 720 genes that are selected from Table 2, more preferred at least 740 genes that are selected from Table 2, more preferred at least 760 genes that are selected from Table 2.

[0119] In a further preferred embodiment, a method of the invention comprises the combination of genes selected from all 786 genes of Table 2.

[0120] More preferably the combination of genes comprises at least five, or at least 10, or at least 20, or at least 30, or at least 40 genes selected from Table 2.

[0121] Preferably the combination of genes comprises AREG, EREG, BHLHE41, FLNA, PLEKHB1 and genes listed in Tables 3, 5, 7, 9 and 11. More preferably the combination of genes comprises AREG, EREG, BHLHE41, FLNA, PLEKHB1 genes listed in Tables 4, 6, 8, 10 and 12.

[0122] Next, Applicants examined the possibility that the subtypes may exhibit differential response to first line colorectal chemotherapy (i.e. FOLFIRI) using a published FOLFIRI response signature. FOLFIRI is a current chemotherapy regimen for treatment of colorectal cancer. It comprises the following drugs:
[0123] FOL—folinic acid (leucovorin), a vitamin B derivative used as a “rescue” drug for high doses of the drug methotrexate and that modulates/potentiates/reduces the side effects of fluorouracil;
[0124] F—fluorouracil (5-FU), a pyrimidine analog and antimetabolite which incorporates into the DNA molecule and stops synthesis; and
[0125] IRI—irinotecan (Camptosar), a topoisomerase inhibitor, which prevents DNA from uncoiling and duplicating.
   Cetuximab can sometimes added to FOLFIRI.

[0126] The regimen consists of:
[0127] Irinotecan (180 mg/m² IV over 90 minutes) concurrently with folinic acid (400 mg/m² [or 2×250 mg/m²] IV over 120 minutes).
[0128] Followed by fluorouracil (400-500 mg/m² IV bolus) then fluorouracil (2400-3000 mg/m² intravenous infusion over 46 hours).

[0129] This cycle is typically repeated every two weeks. The dosages shown above may vary from cycle to cycle.

[0130] Intriguingly, 100% of the stem-like and 77% of the inflammatory subtype samples were predicted to respond to FOLFIRI, as compared to less than 14% of the TA subtype tumors (statistics include only samples with FDR<0.2, FIG. 3F and FIGS. 10A-B). Similarly, cell lines from the stem-like subtype were predicted to respond to FOLFIRI (FIG. 10). The finding that the stem-like subtype has a comparatively poorer prognosis and is more responsive to chemotherapy is consistent with data from other cancer subtypes with poor prognosis, such as basal and claudin-low breast cancer and quasi-mesenchymal pancreatic adenocarcinoma.

[0131] In a further embodiment, the present invention provides an in-vitro method for predicting the likelihood that a subject suffering from colorectal cancer or suspected of suffering therefrom and who has undergone a prior surgical resection of colorectal cancer will respond to cytotoxic chemotherapies such as FOLFIRI, the method comprising
[0132] (i) providing a biological sample from said subject comprising colorectal cancer cells or suspected to comprise colorectal cancer cells;
[0133] (ii) measuring the expression level of one or a combination of genes selected from the group of genes listed in Table 2, and
[0134] (iii) classifying said biological sample as “Stem-like”, “Inflammatory”, “Transit-amplifying (TA)”, “Goblet-like” and “Enterocyte” on the basis of the gene expression profile according to Table 2,
   wherein
[0135] “Stem-like” type of colorectal cancer predicts good response in both adjuvant and metastatic settings,
[0136] “Inflammatory” type of colorectal cancer predicts good response in adjuvant setting,
[0137] “TA (transit-amplifying)” type of colorectal cancer predicts poor response in both adjuvant and metastatic settings,
[0138] “Goblet-like” type of colorectal cancer predicts poor response in adjuvant setting, and
[0139] “Enterocyte” type of colorectal cancer predicts good response in adjuvant setting.

[0140] Preferably the combination of genes comprises genes listed in Tables 3, 5, 7, 9 and 11. More preferably the combination of genes comprises genes listed in Tables 4, 6, 8, 10 and 12.

[0141] A preferred method according to the invention comprises the combination of genes comprising at least two genes selected from Table 2, or at least five genes selected from Table 2, or at least 10 genes selected from Table 2, or at least 20 genes that are selected from Table 2, more preferred at least 30 genes that are selected from Table 2, more preferred at least 40 genes that are selected from Table 2, more preferred at least 50 genes that are selected from Table 2, more preferred at least 60 genes that are selected from Table 2, more preferred at least 70 genes that are selected from Table 2, more preferred at least 80 genes that are selected from Table 2, more preferred at least 90 genes that are selected from Table 2, more preferred at least 100 genes that are selected from Table 2, more preferred at least 120 genes that are selected from Table 2, more preferred at least 140 genes that are selected from Table 2, more preferred at least 160 genes that are selected from Table 2, more preferred at least 180 genes that are selected from Table 2, more preferred at least 200 genes that are selected from Table 2, more preferred at least 220 genes that are selected from Table 2, more preferred at least 240 genes that are selected from Table 2, more preferred at least 260 genes that are selected from Table 2, more preferred at least 280 genes that are selected from Table 2, more preferred at least 300 genes that are selected from Table 2, more preferred at least 320 genes that are selected from Table 2, more preferred at least 340 genes that are selected from Table 2, more preferred at least 360 genes that are selected from Table 2, more preferred at least 380 genes that are selected from Table 2, more preferred at least 400 genes that are selected from Table 2, more 2, more preferred at least 420 genes that are selected from Table 2, more preferred at least 460 genes that are selected from Table 2, more preferred at least 480 genes that are selected from Table 2, more preferred at least 500 genes that are selected from Table 2, more preferred at least 520 genes that are selected from Table 2, more preferred at least 540 genes that are selected from Table 2, more preferred at least 560 genes that are selected from Table 2, more preferred at least 580 genes that are selected from Table 2, more preferred at least 600 genes that are selected from Table 2, more preferred at least 620 genes that are selected from Table 2, more preferred at least 640 genes that are selected from Table 2, more preferred at least 660 genes that are selected from Table 2, more preferred at least 680 genes that are selected from Table 2, more preferred at least 700 genes that are selected from Table 2, more preferred at least 720 genes that are selected from Table 2, more preferred at least 740 genes that are selected from Table 2, more preferred at least 760 genes that are selected from Table 2.

[0142] In a further preferred embodiment, a method of the invention comprises the combination of genes selected from all 786 genes of Table 2.

[0143] More preferably the combination of genes comprises at least two, or at least five, or at least 10, or at least 20, or at least 30, or at least 40 genes selected from Table 2.

[0144] More preferably the combination of genes comprises LY6G6D, KRT23, CEL, ACSL6, EREG, CFTR, TCN1, PCSK1, NCRNA00261, SPINK4, REG4, MUC2, TFF3, CLCA4, ZG16, CA1, MS4A12, CA4, CXCL13, RARRES3, GZMA, IDO1, CXCL9, SFRP2, COL10A1, CYP1B1, MGP, MSRB3, ZEB1, FLNA.

[0145] Also more preferably the combination of genes comprises SFRP2, ZEB1, RARRES3, CFTR, FLNA, MUC2, TFF3.

[0146] Methods according to the invention preferably further comprise determining a strategy for treatment of the patient. Treatment may include, for example, radiation therapy, chemotherapy, targeted therapy, or some combination thereof. Treatment decisions for individual colorectal cancer patients are currently based on stage, patient age and condition, the location and grade of the cancer, the number of patient lymph nodes involved, and the absence or presence of distant metastases.

[0147] Classifying colorectal cancers into subtypes at the time of diagnosis using the methods disclosed in the present invention provides an additional or alternative treatment decision-making factor, thereby providing additional information for adapting the treatment of a subject suffering from colorectal cancer (see FIG. 15). The methods of the invention permit the differentiation of six types of colorectal cancers, termed as “Stem-like” type, “Inflammatory” type, “Transit-amplifying cetuximab-sensitive (CS-TA)” type, “Transit-amplifying cetuximab-resistant (CR-TA)” type, “Goblet-like” type and “Enterocyte” type.

[0148] “Stem-like” type of colorectal cancer indicates good response to FOLFIRI treatment and poor response to cetuximab treatment, which means that patients suffering from or suspected to suffer from “Stem-like” type of colorectal cancer should be rather treated with adjuvant chemotherapy, preferably FOLFIRI treatment, to classic colorectal cancer surgical resection. Chemotherapy, preferably adjuvant FOLFIRI, would be also beneficial in case of metastatic treatment.

[0149] “Inflammatory” type of colorectal cancer indicates good response to chemotherapy, preferably FOLFIRI treatment, which means that patients suffering from or suspected to suffer from “Inflammatory” type of colorectal cancer should be rather treated with adjuvant chemotherapy, preferably adjuvant FOLFIRI treatment.

[0150] “Transit-amplifying cetuximab-sensitive (CS-TA)” type of colorectal cancer indicates poor response to FOLFIRI treatment and good response to cetuximab treatment, which means that patients suffering from or suspected to suffer from “Transit-amplifying cetuximab-sensitive (CS-TA)” type of colorectal cancer should be rather treated with cetuximab treatment at metastatic setting. Thus at adjuvant setting (adjuvant therapy to surgical resection of colorectal cancer), this CS-TA type indicates that patients will not require any treatment in addition to surgical resection of colorectal cancer, but a watchful-surveillance until the patient recur with the disease to be treated with cetuximab.

[0151] “Transit-amplifying cetuximab-resistant (CR-TA)” type of colorectal cancer indicates poor response to FOLFIRI treatment and almost no response to cetuximab treatment but shows good response to cMET inhibition, which means that patients suffering form or suspected to suffer from “Transit-amplifying cetuximab-resistant (CR-TA)” type of colorectal cancer should be rather treated with cMET inhibitor at metastatic setting. Thus at adjuvant setting (adjuvant therapy to surgical resection of colorectal cancer), this CR-TA subtype indicates that patients will not require any treatment, but a watchful-surveillance until the patient recur with the disease to be treated with cMet inhibitors.

[0152] “Goblet-like” type of colorectal cancer indicates intermediate response to adjuvant FOLFIRI treatment and poor response to cetuximab treatment.

[0153] “Enterocyte” type of colorectal cancer indicates poor response to adjuvant FOLFIRI treatment.

[0154] Moreover, “Stem-like” type of colorectal cancer and “Inflammatory” type of colorectal cancer that have a poor or intermediate prognosis, as determined by gene expression profiling of the present invention, may benefit from adjuvant therapy (e.g., radiation therapy or chemotherapy). Chemotherapy for these patients may include FOLFIRI treatment, fluorouracil (5-FU), 5-FU plus leucovorin (folinic acid); 5-FU, leucovorin plus oxaliplatin; 5-FU, leucovorin plus irinotecan; capecitabine, and/or drugs for targeted therapy, such as an anti-VEGF antibody, for example Bevacizumab, and an anti-Epidermal growth factor receptor antibody, for example Cetuximab and/or combinations of said treatments. Radiation therapy may include external and/or internal radiation therapy. Radiation therapy may be combined with chemotherapy as adjuvant therapy.

[0155] In another embodiment of the present invention, the patients suffering from or suspected to suffer from “Transit-amplifying” type of colorectal cancer, may take advantage of the following treatment depending on expressions of EREG gene and FLNA gene:
[0156] 1) EREG gene is highly expressed and FLNA is low expressed, then cetuximab alone treatment should be used.
[0157] 2) EREG gene is low expressed and FLNA is highly expressed, then cMET inhibitor alone treatment should be used.
[0158] 3) both EREG and FLNA are highly expressed, then a combination of cetuximab and cMET inhibitor treatment should be used.
[0159] 4) both EREG and FLNA are low expressed, then cetuximab and/or cMET inhibitor treatment do not seem to be effective.

[0160] A biological sample comprising a cancer cell of a colorectal cancer or suspected to comprise a cancer cell of a colorectal cancer is provided after the removal of all or part of a colorectal cancer sample from the subject during surgery or colonoscopy. For example, a sample may be obtained from a tissue sample or a biopsy sample comprising colorectal cancer cells that was previously removed by surgery. Preferably a biological sample is obtained from a tissue biopsy.

[0161] A sample of a subject suffering from colorectal cancer or suspected of suffering there from can be obtained in numerous ways, as is known to a person skilled in the art. For example, the sample can be freshly prepared from cells or a tissue sample at the moment of harvesting, or they can be prepared from samples that are stored at −70° C. until processed for sample preparation. Alternatively, tissues or biopsies can be stored under conditions that preserve the quality of the protein or RNA. Examples of these preservative conditions are fixation using e.g. formaline and paraffin embedding, RNase inhibitors such as RNAsin (Pharmingen) or RNasecure (Ambion), aqueous solutions such as RNAlater (Assuragen; U.S. Ser. No. 06/204,375), Hepes-Glutamic acid buffer mediated Organic solvent Protection Effect (HOPE; DE 10021390), and RCL2 (Alphelys; WO04083369), and non-aqueous solutions such as Universal Molecular Fixative (Sakura Finetek USA Inc.; U.S. Pat. No. 7,138,226). Alternatively, a sample from a colorectal cancer patient may be fixated in formalin, for example as formalin-fixed paraffin-embedded (FFPE) tissue.

[0162] Preferably measuring the expression level of genes in methods of the present invention is obtained by a method selected from the group consisting of:

(a) detecting RNA levels of said genes, and/or
(b) detecting a protein encoded by said genes, and/or
(c) detecting a biological activity of a protein encoded by said genes.

[0163] The detecting RNA levels is obtained by any technique known in the art, such as Microarray hybridization, quantitative real-time polymerase chain reaction, multiplex-PCR, Northern blot, In Situ Hybridization, sequencing-based methods, quantitative reverse transcription polymerase-chain reaction, RNAse protection assay or an immunoassay method.

[0164] The detecting of protein levels of aforementioned genes is obtained by any technique known in the art, such as Western blot, immunoprecipitation, immunohistochemistry, ELISA, Radio Immuno Assay, proteomics methods, or quantitative immunostaining methods.

[0165] According to another embodiment, expression of a gene of interest is considered elevated when compared to a healthy control if the relative mRNA level of the gene of interest is greater than 2 fold of the level of a control gene mRNA. According to another embodiment, the relative mRNA level of the gene of interest is greater than 3 fold, 5 fold, 10 fold, 15 fold, 20 fold, 25 fold, or 30 fold compared to a healthy control gene expression level.

[0166] For example the microarray method comprises the use of a microarray chip having one or more nucleic acid molecules that can hybridize under stringent conditions to a nucleic acid molecule encoding a gene mentioned above or having one or more polypeptides (such as peptides or antibodies) that can bind to one or more of the proteins encoded by the genes mentioned above.

[0167] For example the immunoassay method comprises binding an antibody to protein expressed from a gene mentioned above in a patient sample and determining if the protein level from the patient sample is elevated. The immunoassay method can be an enzyme-linked immunosorbent assay (ELISA), electro-chemiluminescence assay (ECLA), or multiplex microsphere-based assay platform, e.g., Luminex® platform.

[0168] In a further embodiment, the present invention provides a kit for classifying a sample of a subject suffering from colorectal cancer or suspected of suffering there from, the kit comprising a set of primers, probes or antibodies specific for genes selected from the group of genes listed in Table 2.

[0169] The kit can further comprise separate containers, dividers, compartments for the reagents or informational material. The informational material of the kits is not limited in its form. In many cases, the informational material, e.g., instructions, is provided in printed matter, e.g., a printed text, drawing, and/or photograph, e.g., a label or printed sheet. However, the informational material can also be provided in other formats, such as Braille, computer readable material, video recording, or audio recording. Of course, the informational material can also be provided in any combination of formats.

[0170] In another embodiment, the present invention provides immunohistochemistry and quantitative real-time PCR based assays for identifying CRC subtypes. Immunohistochemistry markers were developed for at least following four CRC subtypes (see FIG. 11):

A) TA subtype where CFTR has 3+ staining intensity and other markers have 1+ staining intensity.
B) Goblet-like subtype where MUC2 and TFF3 (2 markers) have 3+ staining intensity and other markers have 1+ staining intensity.
C) Enterocyte subtype where MUC2 has 3+ staining intensity and other markers have 1+ staining intensity.
D) Stem-like subtype where Zeb1 has 3+ staining intensity and other markers have 1+ staining intensity.

[0171] Table 15 (A) and (B) shows the quantitative RT-PCR results (qRT-PCR) for subtype-specific markers in CRC patient tumors. The values represent copy number/ng of cDNA for each gene. The positive values in the column represent those values above average value for that marker whereas negative values represent below average value. Using the average cut-off, Applicants could identify 11/19 samples that represent all the 6 subtypes including CR-TA and CS-TA.

[0172] (B)

TABLE 15 (A)

| Samples | MUC2 | TFF3 | SFRP2 | RARRES3 | CFTR | FLNA | Subtypes |
|---|---|---|---|---|---|---|---|
| CR559251 | 0.17861 | 24.5687 | 31.482 | 12.47621 | 1.468 | 25.55 | Stem-like |
| CR559521 | 133.207 | 2181.53 | 4.8301 | 4.710633 | 25.716 | 15.11 | Goblet-like |
| CR560026 | 26.179 | 1830.28 | 0 | 5.813822 | 27.688 | 17.88 | Unpredictable |
| CR560030 | 1.22231 | 1272.48 | 30.474 | 14.49112 | 47.279 | 6.631 | Unpredictable |
| CR560080 | 0.06094 | 412.549 | 40.077 | 19.7314 | 22.443 | 15.89 | Stem-like |
| CR560126 | 3.78387 | 1567.72 | 11.231 | 81.04012 | 14.428 | 8.245 | Unpredictable |
| CR560191 | 2.33406 | 490.949 | 13.978 | 32.20789 | 8.9398 | 5.144 | Unpredictable |
| CR560367 | 62.6451 | 400.288 | 12.123 | 406.0998 | 8.1013 | 27.25 | Inflammatory |
| CR560403 | 0.24779 | 85.9297 | 2.1521 | 24.71503 | 8.1945 | 3.665 | Unpredictable |
| CR560476 | 10.5152 | 324.581 | 40.265 | 6.529803 | 3.9446 | 9.282 | Stem-like |
| CR560523 | 133.426 | 696.831 | 32.503 | 15.24705 | 23.075 | 86.19 | Unpredictable |
| CR560527 | 1.85148 | 2083.62 | 37.311 | 7.212504 | 51.276 | 89.99 | Unpredictable |
| CR560590 | 698.171 | 9815.49 | 31.575 | 23.04962 | 29.946 | 13.51 | Unpredictable |
| CR560603 | 98.3348 | 570.059 | 7.3503 | 16.20295 | 10.585 | 12.51 | Enterocyte |
| CR560671 | 30.8062 | 892.399 | 10.128 | 14.60695 | 107.31 | 27.44 | CR-TA |
| CR560973 | 2.9832 | 304.316 | 0.373 | 37.2808 | 68.207 | 6.068 | CS-TA |
| CR560974 | 0.52935 | 1417.92 | 0 | 14.07925 | 207.07 | 80.22 | CR-TA |
| CR561060 | 209.86 | 1950.79 | 8.6177 | 25.15537 | 0 | 21.77 | Goblet-like |
| CR561163 | 342.859 | 2774.7 | 6.8036 | 65.19357 | 43.742 | 47.16 | Unpredictable |

TABLE 15 (B)

| Samples | MUC2 | TFF3 | SFRP2 | RARRES3 | CFTR | FLNA | Subtypes |
|---|---|---|---|---|---|---|---|
| CR559251 | Negative | Negative | Positive | Negative | Negative | Negative | Stem-like |
| CR559521 | Positive | Positive | Negative | Negative | Negative | Negative | Goblet-like |
| CR560026 | Negative | Positive | Negative | Negative | Negative | Negative | Unpredictable |
| CR560030 | Negative | Negative | Positive | Negative | Positive | Negative | Unpredictable |
| CR560080 | Negative | Negative | Positive | Negative | Negative | Negative | Stem-like |
| CR560126 | Negative | Positive | Negative | Positive | Negative | Negative | Unpredictable |
| CR560191 | Negative | Negative | Negative | Negative | Negative | Negative | Unpredictable |
| CR560367 | Negative | Negative | Negative | Positive | Negative | Negative | Inflammatory |
| CR560403 | Negative | Negative | Negative | Negative | Negative | Negative | Unpredictable |
| CR560476 | Negative | Negative | Positive | Negative | Negative | Negative | Stem-like |
| CR560523 | Positive | Negative | Positive | Negative | Negative | Positive | Unpredictable |
| CR560527 | Negative | Positive | Positive | Negative | Positive | Positive | Unpredictable |
| CR560590 | Positive | Positive | Positive | Negative | Negative | Negative | Unpredictable |
| CR560603 | Positive | Negative | Negative | Negative | Negative | Negative | Enterocyte |
| CR560671 | Negative | Negative | Negative | Negative | Positive | Positive | CR-TA |
| CR560973 | Negative | Negative | Negative | Negative | Positive | Negative | CS-TA |
| CR560974 | Negative | Negative | Negative | Negative | Positive | Positive | CR-TA |
| CR561060 | Positive | Positive | Negative | Negative | Negative | Negative | Goblet-like |
| CR561163 | Positive | Positive | Negative | Positive | Positive | Positive | Unpredictable |

[0173] Summary of subtype-specific candidate biomarkers (CRCassignor-7) that were tested using qRT-PCR and immunohistochemistry (IHC) are shown in Table 16:

TABLE 16

| | | Biomarkers for | Biomarkers for |
|---|---|---|---|
| CRC subtype | Signature genes | qRT-PCR assay | IHC |
| Stem-like | SFRP2, ZEB1 | SFRP2+ | ZEB1+ |
| Inflammatory | RARRES3 | RARRES3+ | [RARRES3 TBD] |
| CR-TA | CFTR, FLNA | CFTR+, FLNA+ | CFTR+ |
| | | | [FLNA TBD] |
| CS-TA | CFTR, (FLNA) | CFTR, (FLNA−) | CFTR+ |
| | | | [FLNA TBD] |
| Goblet-like | MUC2, TFF3 | MUC2+, TFF3+ | MUC2+, TFF3+ |
| Eneterocyte | MUC2, (TFF3) | MUC2+, (TFF3−) | MUC2+, (TFF3−) |

[0174] Applicants herein document the existence of six subtypes of CRC based on the combined analysis of gene expression and response to cetuximab. Notably, these subtypes are predictive of disease-free prognosis and response to selected therapies (FIG. 4A). This indicates that the selection of therapeutic agents for patients with CRC could be more effective if CRC subtypes and their differential responses to targeted and conventional therapies were taken into account. Namely three subtypes have markedly better disease-free survival after surgical resection, suggesting these patients might be spared from the adverse effects of chemotherapy when they have localized disease. Applicants also associated these CRC subtypes with an anatomical location within colon crypts (phenotype) and with the crypt location-dependent differentiation state (FIG. 4B), a finding that may aid in our understanding or identification of the cell of origin in CRC tumors. In addition, Applicants validated the subtype and cellular phenotype phenotype specific gene signatures using RT-PCR, which may serve as prognostic and/or predictive markers in clinic for CRC. Lastly, Applicants demonstrate that subtype-specific CRC cell lines and xenograft tumors can serve as surrogates for clinical features of CRC. Recognition of these subtypes may allow for the assessment of candidate drugs and combinations in preclinical assays that could in turn guide “personalized” therapeutic trial designs that target such CRC subtype sensitivities only in those patients likely to see clinical benefit, much as is becoming standard of care in non-small cell lung cancer.

[0175] Those skilled in the art will appreciate that the invention described herein is susceptible to variations and modifications other than those specifically described. It is to be understood that the invention includes all such variations and modifications without departing from the spirit or essential characteristics thereof. The invention also includes all of the steps, features, compositions and compounds referred to or indicated in this specification, individually or collectively, and any and all combinations or any two or more of said steps or features. The present disclosure is therefore to be considered as in all aspects illustrated and not restrictive, the scope of the invention being indicated by the appended Claims, and all changes which come within the meaning and range of equivalency are intended to be embraced therein.

[0176] The foregoing description will be more fully understood with reference to the following Examples. Such Examples are, however, exemplary of methods of practicing the present invention and are not intended to limit the scope of the invention.

### Examples

### Methodology

[0177] Processing of Microarrays.

[0178] The processing of microarrays from CEL files was performed as already described. Published microarray data were obtained from GEO Omnibus and the raw CEL files from Affymetrix GeneChip® arrays for all samples were processed, robust multiarray averaged (RMA), and normalized using R-based Bioconductor. The patient characteristics for the published microarray data were obtained from GEO Omnibus using Bioconductor package, GEOquery.

[0179] Combining Different Microarray Datasets.

[0180] Microarray datasets from different published studies were screened separately for variable genes using standard deviation (SD) cut off greater than 0.8. The screened datasets were column (sample) normalized to N(0,1) and row (gene) normalized and then merged using Java-based DWD. Finally, the rows were median centered before further downstream analysis, as already described.

[0181] NMF, SAM and PAM Analysis.

[0182] The stable subtypes were identified using consensus clustering-based NMF followed by SAM (using classes defined by NMF analysis) and PAM (using significant genes defined by SAM) analysis to identify gene signature specific to each of the subtypes.

[0183] Survival Statistics.

[0184] Kaplan-Meier Survival curves were plotted and log-rank test were performed using GenePattern based Survival Curve and Survival Difference programs. Multivariate Cox Regression analysis was performed using R based library, survival.

[0185] Cell Lines.

[0186] Colon cancer cell lines were grown in DMEM (Gibco, USA) plus 10% FBS (Invitrogen, USA) without antibiotics/antimycotics. All the cell lines were confirmed to be negative for mycoplamsa by PCR (VenorGeM kit, Sigma, USA) prior to use and were tested monthly.

[0187] Drug Response in Cell Lines.

[0188] Cells were added (5×10³) into 96-well plates on day 0 and treated with cetuximab (Merck Serono, Geneva, Switzerland), cMet inhibitor (PFA 665752, Santa Cruz Biotechnology, Inc., Santa Cruz, Calif.) or vehicle control (media alone or DMSO) on day 1. Proliferation was monitored using CellTiter-Glo® assay kit according to the manufacturer's instruction (Promega, Dubendorf, Switzerland) on day 3 (72 h).

[0189] RNA Isolation and RT-PCR.

[0190] RNA was isolated using miReasy kit (Qiagen, Hombrechtikon, Switzerland) as per the manufacturer's instructions. The sample preparation for Real-time RT-PCR was performed using QIAgility (automated PCR setup, Qiagen) and PCR assay was performed using QuantiTect SYBR Green PCR kit (Qiagen), gene specific primers (see Table 17) and Rotor-Gene Q (Qiagen) real-time PCR machine.

TABLE 17
List of primers for qRT-PCR; Annealing
temperature for all the samples are 60 C.

| | Primer sequence | Primer sequence |
|---|---|---|
| Gene Name | Forward | Reverse |
| KRT20 | ACG CCA GAA CAA CGA | ACG ACC TTG CCA TCC |
| | ATA CC | ACT AC |
| | (SEQ ID NO: 787) | (SEQ ID NO: 788) |
| MUC2 | CAA GAT CTT CAT GGG | AAC ACG GTG GTC CTC |
| | GAG GA | TTG TC |
| | (SEQ ID NO: 789) | (SEQ ID NO: 790) |
| CCND1 | AAC TAC CTG GAC CGC | CCA CTT GAG CTT GTT |
| | TTC CT | CAC CA |
| | (SEQ ID NO: 791) | (SEQ ID NO: 792) |
| MYC | TTC GGG TAG TGG AAA | CAG CAG CTC GAA TTT |
| | ACC AG | CTT CC |
| | (SEQ ID NO: 793) | (SEQ ID NO: 794) |
| CD44 | AGC AAC CAA GAG GCA | GTG TGG TTG AAA TGG |
| | AGA AA | TGC TG |
| | (SEQ ID NO: 795) | (SEQ ID NO: 796) |
| FLNA | CAT TCA GAT TGG GGA | ACA TCC ACC TCT GAG |
| | GGA GA | CCA TC |
| | (SEQ ID NO: 797) | (SEQ ID NO: 798) |

[0191] TOP Flash Assay.

[0192] The TOP/FOP-flash assay was performed as instructed by the manufacturer (Upstate, USA). Briefly, colon cancer cell lines were plated into 24-well dishes in biological triplicate at 10K cells/well in full growth media (RPMI+10% FBS). The next day, the media was changed to that containing 3 uL of PEI (stock, 1 mg/mL), TOP or FOP-flash DNA (0.25 ug/well) and a plasmid encoding constitutive expression of Renilla luciferase (to normalize for transfection efficiency). Two days later, the cells were assayed. Samples were prepared in biological triplicate (s.d. n=3) and the experiment was repeated twice.

[0193] Immunofluorescence.

[0194] Colon cancer cell lines were plated, and allowed to set overnight, onto gelatin-coated (0.1% solution in PBS) cover slides in 24-well dishes. The following day, the cells were fixed with 4% paraformaldehyde in PBS (20 minutes, room temperature) and washed twice. Immunofluorescent analysis was performed as described³⁶. Antibody dilutions are as follows: MUC2 (1:100, SC7314; Santa Cruz, USA) and KRT20 (1:50, M7019; DAKO, USA).

[0195] Orthotopic Implantation of CRC Cell Lines into Mice and RNA Isolation.

[0196] NMRI nu/nu mice (6-8 week old females) were anesthetized with Ketamine and Xylazin, additionally receiving buprenorphin (0.05-2.5 mg/kg) before surgery. The animals were placed on a heated operation table. A midline incision was performed and the descending colon was identified. A polyethylene catheter was inserted rectally and the descending colon was bedded extra-abdominally. To obtain a transplant tumor, human CRC cell lines (2 million cells per site) were injected into the wall of the descending colon. Care was taken not to puncture the thin wall and inject the cells into the lumen of the colon. Presence of growing tumors at the site of injection was detected by colonoscopy or laparatomy 21 days after the initial surgery. The animals were sacrificed and tumors were explanted and immediately frozen in liquid nitrogen, and tumor samples were stored at −80° C. The animals were cared for per institutional guidelines from Charité—Universitätsmdizin Berlin, Berlin, Germany and the experiments were performed after approval from the Berlin animal research authority LAGeSo (registration number G0068/10).

[0197] Snap-frozen tissue samples were embedded in Tissue-Tek® OCT™ (Sakura, Alphen aan den Rijn, The Netherlands) and cut into 20 micrometer sections. Sections corresponding to 5-10 mg of tissue were collected in a microtube. RNA from these samples was prepared using the miRNeasy kit (Qiagen, Hilden, Germany) according to the manufacturer's protocol. RNA concentration and purity were determined using spectrophotometric measurement at 260 and 280 nm, integrity of the RNA was evaluated using a total RNA nano microfluidic cartridge on the Bioanalyzer 2100 (Agilent, Böblingen, Germany).

### Immunohistochemistry

[0198] Immunohistochemistry results are shown in Table 18 for subtype-specific markers in CRC patient markers in CRC patient in CRC patient tumors from tissue microarray (Pantomics). If a marker has +++ or ++ while other markers have ++ or +, respectively, the subtype was assigned accordingly. No inflammatory specific assay due to lack of specific antibodies. Out of 120 samples from TMA only the following were useful for analysis.

TABLE 18

| | CFTR- | MUC2- | TFF3- | ZEB1- | Subtype |
|---|---|---|---|---|---|
| Samples | Intensity | Intensity | Intensity | Intensity | assignment |
| COC1021, E12, M, 67, Colon, | ++ | +++ | ++ | ++ | Enterocyte |
| Adenocarcinoma, II, T3N1M0, Malignant | | | | | |
| COC1021, G4, F, 76, Colon, | ++ | +++ | ++ | + | Enterocyte |
| Adenocarcinoma, II~III, T2N1M0, Malignant | | | | | |
| COC1021, D3, M, 70, Colon, | + | +++ | ++ | ++ | Enterocyte |
| Adenocarcinoma, I~II, T3N0M0, Malignant | | | | | |
| COC1021, A2, F, 55, Colon, | + | +++ | ++ | + | Enterocyte |
| Normal colonic tissue,,, Normal | | | | | |
| COC1021, B9, M, 45, Colon, | + | +++ | + | ++ | Enterocyte |
| Adenocarcinoma, I~II, T3N1M0, Malignant | | | | | |
| COC1021, G2, M, 72, Colon, | + | +++ | + | ++ | Enterocyte |
| Adenocarcinoma, II, T3N1M0, Malignant | | | | | |
| COC1021, A13, F, 55, Colon, Mucinous | ++ | +++ | +++ | ++ | Goblet-like |
| adenocarcinoma,, T3N0M0, Malignant | | | | | |
| COC1021, B8, M, 34, Colon, | ++ | +++ | +++ | ++ | Goblet-like |
| Adenocarcinoma, I~II, T3N0M0, Malignant | | | | | |
| COC1021, E7, F, 70, Colon, | ++ | +++ | +++ | ++ | Goblet-like |
| Adenocarcinoma, II, T2N0M0, Malignant | | | | | |
| COC1021, B3, F, 60, Colon, | ++ | +++ | +++ | + | Goblet-like |
| Mucinous | | | | | |
| adenocarcinoma,, T3N1M0, Malignant | | | | | |
| COC1021, A6, M, 67, Colon, | + | +++ | +++ | ++ | Goblet-like |
| Papillary | | | | | |
| Adenocarcinoma,, T3N1M0, Malignant | | | | | |
| COC1021, B4, F, 61, Colon, | + | +++ | +++ | ++ | Goblet-like |
| Adenocarcinoma, I, T3N0M0, Malignant | | | | | |
| COC1021, E2, M, 70, Colon, | + | +++ | +++ | ++ | Goblet-like |
| Adenocarcinoma, II, T2N0M0, Malignant | | | | | |
| COC1021, A12, F, 74, Colon, | + | +++ | +++ | + | Goblet-like |
| Mucinous | | | | | |
| adenocarcinoma,, T3N0M0, Malignant | | | | | |
| COC1021, D6, M, 54, Colon, | + | +++ | +++ | + | Goblet-like |
| Adenocarcinoma, I~II, T2N0M0, Malignant | | | | | |
| COC1021, C9, F, 57, Colon, | ++ | ++ | ++ | +++ | Stem-like |
| Adenocarcinoma, I~II, T2N0M0, Malignant | | | | | |
| COC1021, F13, M, 73, Colon, | ++ | ++ | ++ | +++ | Stem-like |
| Adenocarcinoma, II, T3N0M0, Malignant | | | | | |
| COC1021, F1, F, 73, Colon, | ++ | + | ++ | +++ | Stem-like |
| Adenocarcinoma, II, T3N0M0, Malignant | | | | | |
| COC1021, D11, M, 58, Colon, | ++ | + | + | +++ | Stem-like |
| Adenocarcinoma, II, T2N0M0, Malignant | | | | | |
| COC1021, B11, F, 37, Colon, | + | ++ | ++ | +++ | Stem-like |
| Adenocarcinoma, I~II, T3N0M0, Malignant | | | | | |
| COC1021, F4, M, 48, Colon, | + | ++ | ++ | +++ | Stem-like |
| Adenocarcinoma, II, T3N0M0, Malignant | | | | | |
| COC1021, D1, M, 63, Colon, | + | + | ++ | +++ | Stem-like |
| Adenocarcinoma, I~II, T3N1M0, Malignant | | | | | |
| COC1021, C10, M, 51, Colon, | +++ | ++ | ++ | + | TA |
| Adenocarcinoma, I~II, T3N0M0, Malignant | | | | | |
| COC1021, F11, M, 73, Colon, | +++ | ++ | + | ++ | TA |
| Adenocarcinoma, II, T3N0M0, Malignant | | | | | |
| COC1021, G12, M, 69, Colon, | +++ | ++ | + | + | TA |
| Adenocarcinoma, II~III, T3N1M0, Malignant | | | | | |
| COC1021, E13, M, 60, Colon, | +++ | + | ++ | ++ | TA |
| Adenocarcinoma, II, T3N0M0, Malignant | | | | | |
| COC1021, E4, M, 70, Colon, | + | + | ++ | ++ | Unpredictable |
| Adenocarcinoma, II, T3N0M0, Malignant | | | | | |
| COC1021, F6, F, 70, Colon, | + | + | ++ | ++ | Unpredictable |
| Adenocarcinoma, II, T3N0M0, Malignant | | | | | |
| COC1021, B7, M, 65, Colon, | +++ | ++ | +++ | ++ | Unpredictable |
| Adenocarcinoma, I, T3N1M0, Malignant | | | | | |
| COC1021, F5, F, 29, Colon, | +++ | + | +++ | ++ | Unpredictable |
| Adenocarcinoma, II, T3N1M0, Malignant | | | | | |
| COC1021, C12, F, 42, Colon, | + | ++ | +++ | +++ | Unpredictable |
| Adenocarcinoma, I~II, T2N0M0, Malignant | | | | | |
| COC1021, H8, M, 65, Colon, | + | ++ | +++ | +++ | Unpredictable |
| Adenocarcinoma, III, T3N2M0, Malignant | | | | | |
| COC1021, B10, M, 69, Colon, | + | ++ | +++ | ++ | Unpredictable |
| Adenocarcinoma, I~II, T2N0M0, Malignant | | | | | |
| COC1021, C11, F, 52, Colon, | +++ | +++ | +++ | ++ | Unpredictable |
| Adenocarcinoma, I~II, T3N0M0, Malignant | | | | | |
| COC1021, E3, M, 78, Colon, | +++ | +++ | ++ | +++ | Unpredictable |
| Adenocarcinoma, II, T3N0M0, Malignant | | | | | |
| COC1021, A3, F, 2, Colon, | +++ | +++ | ++ | + | Unpredictable |
| Congenital megacolon,,, Benign | | | | | |
| COC1021, A4, M, 56, Colon, Adenoma,,, Benign | +++ | +++ | + | +++ | Unpredictable |
| COC1021, G8, F, 75, Colon, | +++ | +++ | + | +++ | Unpredictable |
| Adenocarcinoma, II~III, T3N1M0, Malignant | | | | | |
| COC1021, H7, M, 58, Colon, | +++ | +++ | + | + | Unpredictable |
| Adenocarcinoma, III, T4N1M0, Malignant | | | | | |
| COC1021, D7, M, 75, Colon, | ++ | +++ | +++ | +++ | Unpredictable |
| Adenocarcinoma, I~II, T1N0M0, Malignant | | | | | |
| COC1021, G10, M, 65, Colon, | ++ | +++ | +++ | +++ | Unpredictable |
| Adenocarcinoma, II~III, T3N0M0, Malignant | | | | | |
| COC1021, D10, M, 48, Colon, | ++ | +++ | + | +++ | Unpredictable |
| Adenocarcinoma, II, T3N0M0, Malignant | | | | | |
| COC1021, E10, F, 81, Colon, | + | +++ | +++ | +++ | Unpredictable |
| Adenocarcinoma, II, T3N1M0, Malignant | | | | | |
| COC1021, F2, M, 71, Colon, | + | +++ | +++ | +++ | Unpredictable |
| Adenocarcinoma, II, T3N1M0, Malignant | | | | | |
| COC1021, G6, F, 60, Colon, | + | +++ | +++ | +++ | Unpredictable |
| Adenocarcinoma, II~III, T3N0M0, Malignant | | | | | |
| COC1021, C8, M, 61, Colon, | + | +++ | ++ | +++ | Unpredictable |
| Adenocarcinoma, I~II, T3N1M0, Malignant | | | | | |
| COC1021, C3, M, 53, Colon, | + | +++ | + | +++ | Unpredictable |
| Adenocarcinoma, I~II, T3N0M0, Malignant | | | | | |
| COC1021, H3, F, 68, Colon, | + | +++ | + | +++ | Unpredictable |
| Adenocarcinoma, III, T4N2M0, Malignant | | | | | |
| COC1021, C4, M, 50, Colon, | + | ++ | ++ | ++ | Unpredictable |
| Adenocarcinoma, I~II, T2N0M0, Malignant | | | | | |
| COC1021, D8, F, 64, Colon, | +++ | + | +++ | +++ | Unpredictable |
| Adenocarcinoma, I~II, T2N0M0, Malignant | | | | | |
| COC1021, E1, M, 79, Colon, | +++ | + | +++ | +++ | Unpredictable |
| Adenocarcinoma, II, T2N0M0, Malignant | | | | | |
| COC1021, A5, M, 48, Colon, | ++ | ++ | +++ | + | Unpredictable |
| Adenoma,,, Benign | | | | | |
| COC1021, B2, F, 54, Colon, | ++ | ++ | +++ | + | Unpredictable |
| Mucinous | | | | | |
| adenocarcinoma,, T2N0M0, Malignant | | | | | |

1. An in-vitro method for the prognosis of disease-free survival of a subject suffering from colorectal cancer or suspected of suffering therefrom and who has undergone a prior surgical resection of colorectal cancer, the method comprising
(i) providing a biological sample from said subject comprising colorectal cancer cells or suspected to comprise colorectal cancer cells;
(ii) measuring the expression level of one or a combination of genes selected from the group of genes listed in Table 2, and
(iii) classifying said biological sample as “Stem-like”, “Inflammatory”, “Transit-amplifying (TA)”, “Goblet-like” and “Enterocyte” on the basis of the gene expression profile according to Table 2,
wherein
“Stem-like” type of colorectal cancer indicates poor disease-free survival,
“Inflammatory” type of colorectal cancer indicates intermediate disease-free survival,
“Transit-amplifying (TA)” type of colorectal cancer indicates good disease-free survival,
“Goblet-like” type of colorectal cancer indicates good disease-free survival, and
“Enterocyte” type of colorectal cancer indicates intermediate disease-free survival.

2. The in-vitro method of claim 1, wherein the combination of genes comprises at least two, or at least five, or at least 10, or at least 20, or at least 30, or at least 40 genes selected from Table 2.

3. The in-vitro method of claim 1, wherein the combination of genes comprises genes listed in Tables 3, 5, 7, 9 and 11.

4. The in-vitro method of claim 1, wherein the combination of genes comprises genes listed in Tables 4, 6, 8, 10 and 12.

5. The in-vitro method of claim 1, wherein the combination of genes comprises LY6G6D, KRT23, CEL, ACSL6, EREG, CFTR, TCN1, PCSK1, NCRNA00261, SPINK4, REG4, MUC2, TFF3, CLCA4, ZG16, CA1, MS4A12, CA4, CXCL13, RARRES3, GZMA, IDO1, CXCL9, SFRP2, COL10A1, CYP1B1, MGP, MSRB3, ZEB1, FLNA.

6. The in-vitro method of claim 1, wherein the combination of genes comprises SFRP2, ZEB1, RARRES3, CFTR, FLNA, MUC2, TFF3.

7. An in-vitro method for predicting the likelihood that a subject suffering from colorectal cancer or suspected of suffering therefrom and who has undergone a prior surgical resection of colorectal cancer will respond to therapies inhibiting or targeting EGFR and/or cMET, the method comprising
(i) providing a biological sample from said subject comprising colorectal cancer cells or suspected to comprise colorectal cancer cells;
(ii) measuring the expression level of one or a combination of genes selected from the group of genes listed in Table 2, and
(iii) classifying said biological sample as “Stem-like”, “Inflammatory”, “Transit-amplifying (TA)”, “Goblet-like” and “Enterocyte” on the basis of the gene expression profile according to Table 2,
wherein
high expressions of AREG and EREG genes and low expressions of BHLHE41, FLNA and PLEKHB1 genes in “Transit-amplifying (TA)” type indicates that at metastatic setting said subject will be responsive to cetuximab treatment and resistant to cMET inhibitor therapy and this signature defines a subtype of TA type designed as “Cetuximab-sensitive transit-amplifying subtype (CS-TA)”.
low expressions of AREG and EREG genes and high expressions of BHLHE41, FLNA and PLEKHB1 genes in “Transit-amplifying (TA)” type indicates that at metastatic setting said subject will be resistant to cetuximab treatment and will be responsive to cMET inhibitor therapy, and this signature defines a second subtype of TA type named as “Cetuximab-resistant transit-amplifying subtype (CR-TA)”.

8. The in-vitro method of claim 7, wherein the combination of genes comprises at least five genes, or at least 10, or at least 20, or at least 30, or at least 40 genes selected from Table 2.

9. The in-vitro method of claim 7, wherein the combination of genes comprises AREG, EREG, BHLHE41, FLNA, PLEKHB1 and genes listed in Tables 3, 5, 7, 9 and 11.

10. The in-vitro method of claim 7, wherein the combination of genes comprises AREG, EREG, BHLHE41, FLNA, PLEKHB1 genes listed in Tables 4, 6, 8, 10 and 12.

11. An in-vitro method for predicting the likelihood that a subject suffering from colorectal cancer or suspected of suffering therefrom and who has undergone a prior surgical resection of colorectal cancer will respond to cytotoxic chemotherapies such as FOLFIRI, the method comprising
(i) providing a biological sample from said subject comprising colorectal cancer cells or suspected to comprise colorectal cancer cells;
(ii) measuring the expression level of one or a combination of genes selected from the group of genes listed in Table 2, and
(iii) classifying said biological sample as “Stem-like”, “Inflammatory”, “Transit-amplifying (TA)”, “Goblet-like” and “Enterocyte” on the basis of the gene expression profile according to Table 2,
wherein
“Stem-like” type of colorectal cancer predicts good response in both adjuvant and metastatic settings,
“Inflammatory” type of colorectal cancer predicts good response in adjuvant setting,
“TA (transit-amplifying)” type of colorectal cancer predicts poor response in both adjuvant and metastatic settings,
“Goblet-like” type of colorectal cancer predicts poor response in adjuvant setting, and
“Enterocyte” type of colorectal cancer predicts good response in adjuvant setting.

12. The in-vitro method of claim 11, wherein the combination of genes comprises at least two, or at least five, or at least 10, or at least 20, or at least 30, or at least 40 genes selected from Table 2.

13. The in-vitro method of claim 11, wherein the combination of genes comprises genes listed in Tables 3, 5, 7, 9 and 11.

14. The in-vitro method of claim 11, wherein the combination of genes comprises genes listed in Tables 4, 6, 8, 10 and 12.

15. The in-vitro method of claim 11, wherein the combination of genes comprises LY6G6D, KRT23, CEL, ACSL6, EREG, CFTR, TCN1, PCSK1, NCRNA00261, SPINK4, REG4, MUC2, TFF3, CLCA4, ZG16, CA1, MS4A12, CA4, CXCL13, RARRES3, GZMA, IDO1, CXCL9, SFRP2, COL10A1, CYP1B1, MGP, MSRB3, ZEB1, FLNA.

16. The in-vitro method of claim 11, wherein the combination of genes comprises SFRP2, ZEB1, RARRES3, CFTR, FLNA, MUC2, TFF3.

17-26. (canceled)

The application's sequence listing, which the Patent Office published only in electronic form, follows.

SEQUENCE LISTING (798 sequences)

SEQ ID NO: 1 - DNA, 8529 bp, Homo sapiens
agatttgcataaaaaaggccaagaaaactctggctgtgccccagcaacggctcattctgctcccccgggtcggagccccccggagctgcgcgcgggcttgcagcgcctcgcccgcgctgtcctcccggtgtcccgcttctccgcgccccagccgccggctgccagcttttcggggccccgagtcgcacccagcgaagagagcgggcccgggacaagctcgaactccggccgcctcgcccttccccggctccgctccctctgccccctcggggtcgcgcgcccacgatgctgcagggccctggctcgctgctgctgctcttcctcgcctcgcactgctgcctgggctcggcgcgcgggctcttcctctttggccagcccgacttctcctacaagcgcagcaattgcaagcccatccctgccaacctgcagctgtgccacggcatcgaataccagaacatgcggctgcccaacctgctgggccacgagaccatgaaggaggtgctggagcaggccggcgcttggatcccgctggtcatgaagcagtgccacccggacaccaagaagttcctgtgctcgctcttcgcccccgtctgcctcgatgacctagacgagaccatccagccatgccactcgctctgcgtgcaggtgaaggaccgctgcgccccggtcatgtccgccttcggcttcccctggcccgacatgcttgagtgcgaccgtttcccccaggacaacgacctttgcatccccctcgctagcagcgaccacctcctgccagccaccgaggaaggtaagccttccctcttgcttccccactccctgctgggctgagacgctcccaggagatcccgcccctgccacgcatcccagtgcatccctgcttggggtgccagtagcgggaagggcagaagttctgcctgacctggtctgtcatcacaacaagcctgtatcaaatttgaggcacccctcccacgccgcccaagtctcgcgcattctcctcccgagttgtaccagctatacttaagggcagtttaaaaataaaacaaacaaacaaaaacaacaaaactaaaaaaacgaagaactgaacggcggtttaaaaaaaaatagatacacgattattgttaaagatgctagcactggagctgcgcagagcgttggaagtggtgtttggtggaggagtttgtggtgagcattctggccagaggcccctcgctcagcctcattctgcaccttcctaccactgggcaggattctagtcacaggaacatttcctgtacagaaaggaaaaccaggatgcacaagtagataaccttttaagggtctttttgtcctttgtcaatttagattttggaaataaaaccgggactggcacggagtgtgtggaaaattgaacattggttgtaactgctcagatacttgaggaagagggcataaagggaatctctggaaatcacttttctattgctatcagtttttaacttaggagtggttttgattagctggagaaaatcatgcaaaagagattcccaagtttttagaaaacggagggagagttcctgtgcaaaaaccatcaaagcaatgaaaacctcatgggctctcaatattttttctgaaaggaaaacatatacaatgcctctgagctgatttgggtcccctgggttggaaaagggagcttcctaatccctttcagggcttcagcagcctctccctttcaatctctagtagttttcctacagacatcattagttaaagcaaatgcaaagttctttagcaatctttcctggcagggaccatgagtttgcaatcatcttattggttagatttctaatttattgcaaatgtttggcatttttcaaacatttgtccaacatgtaccatagaccaaccaatacaggttagtaatattttatatacatcctgagagctcctaattggaaatgtttgattttgtttgggtgaggggacttaagggcagttttatgtatgttgcttttatttcttcccactatcagcagcaacattacgcatcttacatttctccaaaaagccacttttctccttcaaaataaaagtttatgttcttcaaaattccagctttgtgatttttctaatttgataaataacgcttctattaagtcacatagttttctatgaacattaaatttcacattagtgaaaatctcatttcacctaaattttaaagacataattaacacatttataaatgagagaagggcaatataattgttcttttttttttttttttacttctcccaagaaatcaaactcttagaagagcttttagcaggtcttctgataattgtgctagtatacaatccctaagtttgatcagaccactaaaccatttttgcttcgtctttgattagcttcagaaacaggtttatttatttgtttgttttgagagtttgaaacaggcacagaagggcaagaagaacctgtaccagggagcttgcagataacaatgaaatgaatgctgcctaactcaagcacaatcttggcagaggcacaaggtgacacagaaccacttagagcaggctgttgtaattagtgagatgtgttttcaaggtggaaacagcccacatgtggaacgctagccagtcacccctcccagtccagacttggcccccctgagatacagagctctgccgagtagagccaactacactggtgtcctgtggctgagaaagacaatcttttgtctatattttctagttaccagttttcccaaattcctcaagtatctttggttctttgggtgctttctccttcaaaaggccttgggaataactttttcagactgaatttcccagaggttgggaggatgagctgaaaagctgcaccctgtctcagttaactataactacatacacttgtatactctgcccacaactcccttttgagagtcataatttattaaacacaacaacatataggcattctcattttgctcccaccacccctcccccccaaaaaaattgggaagcatgggaaaactttcttaggattgagtgttcctgcttttatagaggaggcagaagctgaggttaaataggacaattgctacttttgtctggataagtccctttgagttgtttacaaacgccacctactgttctcttttaagcaaacttactaaagactgtttttcacatttctagctccaaaggtatgtgaagcctgcaaaaataaaaatgatgatgacaacgacataatggaaacgctttgtaaaaatgattttggtaagtaatacaacaacaacaacagatttcacattcagaagttttatttaccagtaaaacttcaaggtgcaaatcattatgatgttgctagataaaggttgggtaaaacaccattatagctcatgtatcccaaaatcatctaacttgatctatcctagtttcctccttatgtaactgtctagcattgagttgtatcttgttaggtgagactcattgttctgttaagccaataatcaaataatgaaaattattcagattatcaatttccagtggcacattttaaatccctttttttttttttttttttttgccgacaggcataatcccgagttctattttcttttgattacttaacatgtgcaccagggatggaagtgtaaatattagccccagccaaacagattcaaggctttaaattggccacaaataaaaatatttttactttctttataacccataatgattttaaacctctgtgttctaccattagtgaatatatccaaggcactgattaataatttgtcaaggaggggttccttaagttgaaaaagaagagtggcttactgagaagacacctaacatggaacacctaacaaccttaaaacaccatcttaaaatcccttttaaaaggtttttgtaaattttgtatgactaagtctagacacatttgccacagtttcgaaaatagttttaaaaaggaaaaaaaaagcttagaaatttactttagcaagatacatgatagatcacatggtgtttggggacaataaaaaacacatgtgatatgttccataagttgcaagtcactcccctgaagacaggattataaggggaaagagagctggggctttgtctacatggaactctaccagcacctcatctgctgacttcagggctctcaggtcagaagaggagcccagctagacacaggatcaatgctaaattcagagttgggaatgaccaggaacttcacccagaggcattcttgcttttatccttttccaagggcaggtaccttttggtgtgttggaattattggtaccttttaaaaaagtatttattcaggcacaaggctgaacttactcataagcagatatgttccctgctctgtcaatcaataatggagtctaatagacccatattaacacttctacatattcaacatagtcctcgagactgagggaaatcactccagctctcactctccttaccttgccatcccagaaatctcaggcctggtcaggtccctaaaactctggaaccatccaatccctgctctttgacaactccaggtctcttccagaaagtgtcctgggtttaactctgactggtcccagaactaccatagtcccggtgttgggaaaggcttcacactgctgaggaaagagaaagaagggaggtagctcaaagtccttagcaacttttcccctcaggaggagccacaaatggggctgacggggtttcatatgcctgttttcaaatgtatacaaccctcaaactggctaagagccaggcatgttagcagcagataattccaaatcaccagagccttaccaaaacacagttctcagcccccatgctacatcacttcattaagggcaagatagaaaaatatcattttataaaatttctattaaaaagcctataaaatatcatgttcttctggcagtttatatcctttgcactgcacataaaacagatccttcctgacttccatgaaaagttgattgttacactgtggagctccataacaattggctttgggaaacatgcacacacacctattacttgcttgctttgtggctgaccttacagaagaccccctttctaaggatgccctatcaagacatgagccaaaacatggatgcctgtgtgccttagtgtgctccctccttacagagagaaagcctttcaaaacaacacagaagttatcacacttaaggtatcacatgcatagatacctcacaagctttgttttctatttcttcactctttttgacccatagagggataatgaagcagaattttaagaactgcatcataagattattggtttataagcactattccatcttgcctctgttctttgtgaataatggaaaagtaggaggaacaagcatagaaatctgatttatttgacttgactactctgggaaggcatcacctcttccctactgtgctcctgaagtacaagggaaattcagtggtgcaagtactggtgaataaaaaatggttcagaactaccttcctatatatacaacctattgtaggaccagaaagtatcatcacctctgcctgcgatcacatcctgcatcctcagtcacatcctccaggacaggaaaggttatgtgggggattcaattctctctgtttgggcctagctgaaaatccagggagaaaatccctaatgttttctcatgataaacatttgcaaaattagttattttagagctagacaaagatgactaaaaaatcttcctcctggttaaaagtgatggttttttctgatgtttggagcttgagaatgtttcatttggccaggtgaaatcttatatatgccctacctgtactacagacaaggctcccaggtaaagtgtaatcagtccatttctcccaccatggtgaggtctatccaacaccctactcccaatgcagaggacacaaaagcatgaaacatttccacaagtatggcttattccacgacttgagtctcaaaaactgagaattcagtaccacagttcagatgcatatcataccagacaaaaccatggttggccaagtcatagcatttttgatttacctgctagagattctataatttcctggttgactagaaagccatactcagtcaaattcccattctgatatttaaaaaaaaaaaaaagaaaatctcaaaaacagttgtacgcaacacagaaaaatcttcctctattactaatttaaacatagattaaactccatcaaagtcaggaagtcatacttacacatcatctatacagaatagctgtcaggggcacacagggtcttaggacacattgcagctgggcaagtttatgctgcaaccactacaaaaacatggacattgcctcaagacaccacagtggtattacaggaggaggtttggcaactggagttctagcaaacaacctaaactgggtgacctcatgcaagtcactaaacttctctggatttaagattctttgtgtattaacaagcaattttaatgggatgatcccttctaaccttaaaattctattcttttcctgctttcatggagtcttgaaatttaattccagcatacacgtttgtagggctttctttcccagagcatactgttcatgactataaaacgtgtcctttatagtaaaccacttacttttggtcttcgcattctaacgagtctacatatacattttggaaacagtacatatatgatccgtaaacgccttggccttggactggcaaatgagagcatataaggatgaggtcttcagaaaaacacttttatgactaaccacgttgtgctgttaaaaagagacttgcatattgtttctcctgctttaccaaatcaaatgcagctgtaagatcaattctccttccctgtaatctgatctttagaaaacaatgattgcgtgacacagtttccttacaggtttgtccaaaaacctcttgcataataaattgagtttaaactttacggccacagagggatcatatttcacctaaaagtcaggcatttcttttcatgcttaagtttccaacagaggaagtcatttgttggagagagcacacaccacatgcaactttcttacaaacacaagggtgagtgaggaaaggagaagaaaagttaattgagtcccgcaaagagagagttttgaaaaaatggctgattggaaaccaagtgcctggcaaatgctttgaggctttagcagtggagccacctgctgcccctagctcccaacccccgatctgcagcctctgagggtcccattagctctaggaagcctctctttcctcatccaggccaagtcacacgagttggcagaatggggggaggtatactgtattccctcattataactggcatgactctttctgccctccctcatagcactgaaaataaaagtgaaggagataacctacatcaaccgagataccaaaatcatcctggagaccaagagcaagaccatttacaagctgaacggtgtgtccgaaagggacctgaagaaatcggtgctgtggctcaaagacagcttgcagtgcacctgtgaggagatgaacgacatcaacgcgccctatctggtcatgggacagaaacagggtggggagctggtgatcacctcggtgaagcggtggcagaaggggcagagagagttcaagcgcatctcccgcagcatccgcaagctgcagtgctagtcccggcatcctgatggctccgacaggcctgctccagagcacggctgaccatttctgctccgggatctcagctcccgttccccaagcacactcctagctgctccagtctcagcctgggcagcttccccctgccttttgcacgtttgcatccccagcatttcctgagttataaggccacaggagtggatagctgttttcacctaaaggaaaagcccacccgaatcttgtagaaatattcaaactaataaaatcatgaatatttttatgaagtttaaaaatagctcactttaaagctagttttgaataggtgcaactgtgacttgggtctggttggttgttgtttgttgttttgagtcagctgattttcacttcccactgaggttgtcataacatgcaaattgcttcaattttctctgtggcccaaacttgtgggtcacaaaccctgttgagataaagctggctgttatctcaacatcttcatcagctccagactgagactcagtgtctaagtcttacaacaattcatcattttataccttcaatgggaacttaaactgttacatgtatcacattccagctacaatacttccatttattagaagcacattaaccatttctatagcatgatttcttcaagtaaaaggcaaaagatataaattttataattgacttgagtactttaagccttgtttaaaacatttcttacttaacttttgcaaattaaacccattgtagcttacctgtaatatacatagtagtttacctttaaaagttgtaaaaatattgctttaaccaacactgtaaatatttcagataaacattatattcttgtatataaactttacatcctgttttacct

SEQ ID NO: 2 - DNA, 4746 bp, Homo sapiens
tctcccactggttcctcccctctcaactgctctggttcttataaaaacctcacagccttccactaacatcccgtaggagcctctctccctactgctgctacacaagaccctgagactgacctgcaggacgaaaccatgaagagcctgatccttcttgccatcctggccgccttagcggtagtaactttgtgttatggtgagaaacttttctcccatttctctgtgtttacttttctgcctctgactttggcttacttctatttttcctctccctcctcctcttcttccccctttctctgttataatcttaaagtaccattactttcacatttcccagtctccgcagaaactgatctgttctattaagtcttttttatatcctaaatatccagagtcttatgcaacttaacaggcaaacccgttcagtggtaagtctctgtatatctagaaactcatatttcagaaagaagataccaaattcccagccccctgcatcctcatttttaaggatatttatttagactttggtatcaatgggttaagggtattgtttaaaccacttgcctttgagaaaatccatttttatgtgaagtattaagtatagccctttctagggactggacaatctcatgaacttactatgtttgttcagttaattaattttaaaataaagttttacatcaaaagaattttagaaaagaatcattttcataactcctgttgtcagaaaataaattttgcctgttttctatatgtcattaaatatacctgcatttgttcaaagcttataaaaggaaatctgaagcaaagttatttacttatttcagtcttttgtttcaattacctagatattttcattgttttaaaatttaaattacattaacaaccataaagattatgcttctcactcttgtattcacaaattttctgtattagaggatttgatttcttcacctcctttttaagttttgaagaaaattcacttgctggcaaatattaatagaagcttcttattccaaaatttatctgctgtgctcaggagagtggcagaaagaagaaaacttcggctttgatatcgtttcagttctctctctgaactggcatcgtgcccagggtgagctgtcagctggagctagtggtttctgtggctgccaatttaacacaggttcttaagaggctttcggaaccctcttagaaacctgccctagtaagcccagcagagcaactgccctgtagttctcttgcctggagaaacctggctgtcttctggatccttcttaatcctctttgaccctgttctcaaacaggctctgaataaatcagagaagaaggttctctggagacttctgtacagcacttaaagtgtcttattttgcttgtctgaagacgtcatagcccttgggaaattttagctgaaaatggccactccctccttcaacatcagagaaactaaaatatagagatatccacagcaaggccagagctagagaaaaacctcataaatcctaaattcctgaaatttctaataaccacactgctaaatatattcttcatgtttttagactctttcctcttcttccatccctgtatttaaactatcacagtgtctaaattgataaataataacataatgaatcatggataaatattgatataatgaatcttttttttttaatttcagaatcacatgaaagcatggaatcttatgaacttagtaagtgaatatttaacttctttattcaaatcccttgcattaaagaacctcttcttatttttaaataaacaagatggaaagatatataacagggagggaaaagggggcctcttttggaaaactaaagtaaatttttaaatctaatgactataaaaattgccaaaggagcaattttttaagtttgaagtagtgcaatatgggatttaagctacaggcgacatatttagaagccataaaatctcatttggaaattttaaattggcaccacgtcaactgcacagatggaaaacgaggagtaatgacaaatggtaaagcacagagctggacgccaagtcagctgggagaccacaggcgccacgttaagctgagtgctgttttggtttttttgtgtttttctttcttgtttttttttttgagacagtgtctcactctgtcgcccaggctagagtgcagtggtgtgatctcggctcgccgcaacctccacctcccaggttcaggcaattctcatgcctcagcctcctgagtagctgggattacaggcccatgacatcatgcctggctaatttttgtatttttagtagagatggggtttcaccatgttgtccaggctggtctcgaactcctggcctcaagtgatccacccaccacagcctcccaaagtgccgggattacaggcatgagccaccacacccagccagctgattgctgttgaatagctggatttataaagactgagcataggaggaaatggcacatcactctcatttttaatttattcattatttttatagtgtttaaactgttcatgtatcggcaatctagttatgcttcataaatcctcaggacagagaatttctcctcaaaaggaatttaaaatctaccaagtagaaatacagaaattaagaaaggcaaagtgatcgtccaaactcaaaaccaacaaagcctatatgacaagtctctaagacacatggattgattactgatttcatttgatcaggaagttaatgaaatctactttatactctcctttaatttttgccaatctccgtttatatgagttgcataagttaaggcactttcaaatatatttgtgtcaaggaatattcacggaaatatttccagctatgtgtcgctaaaactgcatttatttattttctgttctaagatcccttcattaacaggagaaatgcaaataccttcatatcccctcagcagagatggagagctaaagtccaagagaggtcagtaacaaaacttcatgaggagtggtcatttttcccagtgtagatcacagatctgaattggagtgggaaacagctttttcatcatatacattatttctaattgtatctttaaaatcaaaaaacttaaaagcaatattcagaaaacaactgaattattagaaaattatttggggaaagatccggaaaggagaaggaaggaggagagaaaggaggacagaaagaaaacttctattttcattaaaaaaaaaaaaaaaatctcctgttctgccttccctccctggttttttttttggttggttggttggtttttctgagacagagtctcactctgttgcccagactggattatagtggcactatctcgtgcctcagcctcccaagtagctgggattacaggcacgtgctaccatgtccagctatttttgcattttttgtagagacggggttttgtcatgttggccaggctagtcttgaactcctgacctcaagtgatccacccacctcagcctcccaaagtgctgggattacaggcctgagccaccgcacccagcctctccctgttctttaaatatctcttaatataggggggcatggagagaaagtctctccaatattttcttcttcttttccatttttgtatttttccactttatccttctcaattttggcctcttcttccactttctaggatccgagaacgctctaagcctgtccacgagctcaatagggaagcctgtgatgactacagactttgcgaacgctacgccatggtttatggatacaatgctgcctataatcgctacttcaggaagcgccgagggaccaaatgagactgagggaagaaaaaaaatctctttttttctggaggctggcacctgattttgtatccccctgtagcagcattacagaaatacataggcttatatacaatgcttctttcctgtatattctcttgtctggctgcacccctttttcccgcccccagattgataagtaatgaaagtgcactgcagtgagggtcaaaggagagtcaacatatgtgattgttccataataaacttctggtgtgatactttcatcttgtaaatctgctttcttttgggaagatattgagatatttaaatcatggcccaccttacccaaaataggagattctgttcatctcatatctagtattaattagaaaaataactacataaaaagaaggaagctaagaaggcactcactcagccataaattctctaaaccctctctaccttggaatccgtgaatggaatctggtatgttttttgcaggattttcctattgtaaattgtggcaaatacagggctcccttcatttgcttttcatctcttatgcatcaaagtcaaaaacatttctgaatcaagataatctagaagagaaaaaaggaggaaaaggaaaagagaaagcagaagggacaaataaaagcaattggcaaaaactgtcaataatagtttatacacttaactatatcaataatcacattatatgtaaatagtctaaacaatccaattattttttacttctacttatgttatatttttacttctacatttgttaaaggttccacgctacatttttactattcttgctttaaataattttaataatttcttttaaagtttagataataagaaaatatcccgggccaggcacagtggccacacctgtaatctcagtagccatgaccataccaatgcactccagcctgtgaaacagagtgagactctgtctctacagaaaaataaaaaagaaaagaaagaaaag

SEQ ID NO: 3 - DNA, 39825 bp, Homo sapiens
gtttttacccctcctgggatcaccactgacagcatccatgaagttctgacagaagaacacaccaggatgacaaagtagtgacttttaaagagcagccaacaacaagcatatagggaatctctcagcaaatacaggtaggagaaattcaaacgtgtgacaataggtttatgtaaccaataatgtgactagatgaaaaacagggcaaaaatactggctgtgactatttaaataatttctctgaagagataaaatgtatttaaagaaaatgatacttccttctgtgtctcataagattgctaagtttttatcttcttgtcttcactaagcaaaggttaaataaaaagtaaatcatttataaactcaatacttttttttttctggatttgaagagaagcttgagtaggagatttaaacagaaggaggaaagcatccatgtagatgcacaggactaacaagaaagctattgtttgaaatgccatgtatcttcatcgaggtagcacactaaactactcccagatctacactcacttgtaatactaaacatctcccaacaatgacagataaccagtattgtcaatgtagatttatttgtaataaaaactgtagtaatttgaactcattatattaatagctattgaaactagaaagttcttgtagttcagagaaattgactttttgagagctgaagctgccaatatgtgatgctttttctttttaagaagtggaaatgtcaaatgatcagaggaaaaaactggaaagggaagtactgaaagatttaattggaaaatatgctgttcatttttctggatgttcctgtaacacgtttgagacattttatttctgtacttcaatgatattattactagcctaaaagacgtacaatacaagggatgagaggctttcagaaggatcctgaataggtgagtcaggtcagctgggtggtcttattatcagtttttgatttccccgttagagtctgtttgaagtgaagtgcctttcatctttccacccactctcaccatttcaacattctaatttagttcaactgtttttattctgttttgttaaaaaatgagcccaaatttggggaaggcagggagacaccctctcttgtggtttcatgtaattttttgttatggtctactggaaaagaacaactttaaaaaatgcaatttcacatacacttgatcccccattggactcaaatctcttcaacaattcatgttaatatttttctaatttaaaaaactatttagttttaagacttcactgatttttggcaggcagctttttcaacatagtttcaactctttgaacctgtccccatagctcttttcccactgcctgagcttccaagatagcagtggccaaagactgtaataaggtggaagtccatacagttacttgtctagggttccactaaccaagttacgttgacaactgactggtgccacacaatctgacatttttacagaaactcagagcactgtaattaactcaagagatatgggggggaatcctcatttttaaaccaaattaataatgaaaacatgaggtagagggaaaaggggcaaatatctgggatacacatattaccaaaggttagttttgctttgttttccatattctcatacccaaataatccatgtaattgcagcccaagacctggtctcctcccctccatgtctatttggtggaagggaggcagtgctatgaagtgaacgcacttaggcaaagagaaaaaaatatccaaataaacaagctatgatgaggaaaatgcagcaggccttcttgccagggagtgagtggctggtcaatgcaccaggggctacttacacaagctgggctcctgaggagaacaaaaggggttgtggcaagagttgtgatgtaatggggccgtggggtggcctggggagaggacgtgaagcacaaaattattgctatctgatctctactttcttcatatccatagatatcttggatattactcttaagtgtacttcttattcaagatatgctgaaatttaaaagcaaatattatgaaagtacaataagaatatctgcagtgtcattccatctgacttctctcccctatctctacatgaccaaagtcatctttcaaggaaactctaaattaccattgcctccacgaagacttccttatgctttctttcatatatctgcaattagcacatgtaatcggtctcctcttcccttactttgcccatgtcttccttaagacgcattcctttttactttgcactatacacagcatagtaatcccttatgaggcagactataataagctaagtgaaagcaaagataatggaacacatttttttcaacctcaaagtgcctacatagtattaaaccagcaaactaactaataaacgaaacacaactagttgaatgagatctacaacctaaaaaaaattttttttaactccaaaaacaaagttcattagttttgccggaaaattagagaaatgggttgcagaggaggaaaaaactacagaaagtgaagagcaaacacaagaaaacagggacaaatggcaaatattttacttattcctccccaaaataaaagatgatggggaacaggagactgaagatatgctttcaaagaaaatatgtattattgacctttacataacttcaagatttttaagtgatggcatgattaggaaagtatatttgtgactatcataatgttttattacaggagataaaagctactcttgaacttgattcaagtcaatgtaatttttttctagcccattcccaaccctaaagcctttaggtaactgaatacatttgtctcttgtaaattctcccattgtttttttgtataaacactacctccacttccatttatataaaagatagcataaaatgtataagctctgtatctgctctttaaaaaacatataccctggaaatgtttccatttcagtacacacacaacttcctccctcttttttttttttttttttttaaggagaagtacattatttctttgtgtagatgcagtgttgtttattcacccagtgccctttagatggataccagccttgcttctaatcttttgcttttacaacctatgttgtaatggagtaacctcactcatatgtaatttcattgacctgcagaatactgataggtaaatacacatgtgattttggatggattcaaagtcattttaaattgtttagattgtttgctttagtcaaacttcttaaactggattcagtacgtattacatgatattcttaaaatacgattttaggccatgttaattcacaatggtcctctagagcacccagaaagtggccactgaattccaaaagagatgtttgtgttggcgagtgacaaaaaccaaaaaataaaaaccactactataaagtgctaaatgaattggtcattaataataagaaagattattatttttctcagattatcccagatatctggagcagtctggagacattaggaaactatataacatgtaaccatcacgacagttgtctaacaatgcttataagcactaaacccatgcaaactacttgtaaccttaactaatccaaatgtagaaatacttcaaggccatatcatactcaaccacatactttgccattgaaagtaatggcaaaaaccgcaattacttttgcaccagcctaatattaaagtctgtatactccctgtcaaaccaaagttctattctgttataccagcctcatttcaaaccagcacagggagtaaaagttaaacagaaagaacaatgtggttgtatatggttatttatggtttgttttttaaactcctaaatgatgttttttatttttatcttatgaagaaaaatgatattaaaacaattcattatttttgcttacctacaaggcatcataggcaagtcaaagaaagtaacaagatgcctctgctaagagttattaatcctgaggcgtaaacaaatcaaacggtgctttgtttttagtttgatgagtgaaataaaatagaatgaatgagaaattatttaattccatcatcaaaaccatccaaatatttctcagggagaacctctccctttcataattaaattaatctgtaagtttaccaaataaacaccatgaactgtgtactttcaaactgttttaaacaccacctcactgttctagcattttttaaaaaagcaaatacaaagttttgtgtatttttttttcatcagcatttgttggaagacttaaattaaggttaacataaaaatcacagagcaggaacattatcacctgtagcaaggagtataatgtgtttgggtgaatctgttgtcaggggccaggtaagaaaacaagtaataacaatgtctccttctgaggggaaactgggtgaccatggacggtgttaggatacaggaacagaaagaaatcccggcctcagtgacaacatcttttaagctagacgaaacctactccagctatgttgatgttttgttaaaatattgaatatatttatcaactatttttaaatttcacacattttaattaagtgtttacactacaattaaatagccaaaagtaaaatcaatagactcttattgctattctgagggggaaaaagtacactacaaatcaatgctgatttgagagccatgttttaacatctctttggtcaatcacttcaattagcccatcaccagactctgtctcaaaaaaaaaaaaaaaaaagaaatcttccctttaggcatgtattgtacattctattttcaaagatgaaccatgcattttccaaatgcaatacatacagctttacactgcaatggtacttgaaaaatcttttggcacgtagtaagatttacttttccttttgatgcttattttgccaaattgcatttctgtacatgtatcttcaataaaatccacagagaaggtaaggaaacaatactcagtttatcaaaacttagtcccacaagactattcatatcattgcataaaacataaaaatgaatatgactaaaccagtaagaaagttactagactgaactccaactgtctgttgccagtgaaactgccaatatttgactgtttttgacaacaatagcaattttatatgcaacttttctatttctgaagcctaactaggtacctaatagaggtaactatattcctgaagcctaactaagtacctaacagaggtacttatgaccaatcctcgactcaaggagacttaaaaattagaaaatgtttataactaaaaattaaatgaataaatggcatattatcttctattattttgaactccagtggaatagagactctataaaacactatgcttaaagataactgaatgtatcatctgacaacagatattagatctaaaatcgagctaaattcaccctcaagatgtttgtgaaaaacttttagagctgatgtttatgggcagtctgtgtaagaacatgatgtgaaaatactctgatcttttatgtgtcttatataacatatcttataaatagagctaaaatcagacaaggttataagttttatgatttaaaaaaattcttaattctaataaccctactcaaaaattatgttgtatatttgtagtatgtgtgaatatgtatgtatatacatatatttgtgtatatatttttatattaatatatcagggattttattaaatgttatatattagcctacctcaagtgattaagattttacttcttttcaaaaaacaatgtagttcagccatttagtggtaaagtataaagcaatcattcctctgtattttattatactataaaaataagacagcagtatggaggaggattataggttatttaaatttacttttccttttctctggcgacatcatagagcacaatcaagaactcagaggcaatataactatagaaaataaataactggatttagcaatttggagtttctggttgaccttatcaagaaaaatggaatggtgccaagaactatattagagttgtaaaaggaaacctaagtatggaacattctaaccaagaagtatggctgtaaaaagatggaggaaaaaagaagagaagatacagtagggctgaagaagggttctctttttgttttatagcattcaaagtcttcattatgttaaggggttaaataaagacctggtaaagaaagcacagaggatgaaagtcccatgtgagatagaggggaataaatccagtacacaggagtcagactgccctggagaccccatcgtgcctcattctctggcacggtggggtagataatcaccataatagatgagtttaaagctagaggacacaggagttcaaaagttgttttctaatttttttttcttatttttgaaacaagaggcaagggaatctacctcacggtgaaaagcagaggccagaaagaaaggaatgggagttaaatggtacgataagttgaagaatcaactgttgtgtgcacctttaaggtgttaaaaccttaatcattattaaatgaaaaaaattaaatgcacagctcctgtattttctaatcatatattctcatttcaaattctaaatcttcaaactagtttaagaagtcaaccatactgaaagtataatgaaaacgaaggcactgcatcctgtgaaaatagattgtgacatacaaatctcactccacctcctccaaaatttccatttcaccttctgctttgtaaggaagaatgtagtgaaatcaaccaggttactataatcctgcatcttagtcaattagcttagtcattagcttagtaaaataagtgttttcaataaagttggcatcaatactccccaaataacatgttcttataaaacttcagaagccaaaataaatgcatcagtgtttcagaacaaaagaatatttgatgagacaaaactatcagtttattaatatctcaataaaccaagaaaagagtacagtgaagtattttgttgttgctgcttttttaaaaaaagtttatttgctgtggtagactaagctggtatttattatagaaaagctaaaatgaacatacttaattcccattataagtgggaaagagaaatataaaattatggtttctaacatattatctataaatgtaaccctaaatccaatatcacatttgccattatttgcatgtactgcattctcgagataactctgtgaattttaaaagcataccaacaggccacatatatacattacttaatagtcttatattaacgaatttaaacaaggagcagcatgtaagtgctcaatgtatttcaagtaaataaataaatggatagataaaattttactctataaatgccctttaactatacaatcacttagagggtataaaccaaaaacaatatgagttgaaaacataaagaatctttcttcctgtacaattttgagaaaaaattagttaagaaaaatatgtggagtaaaaatgcacttgcatgtatgaatgttatcaaagatggctgatatgctcatcacaggcccacatattctgatctcagagtctttaaaatgtgggggtttggaagatgggattttataagtgatggtgcaggcactgaagttggcaggaatatgggctagatagctgcccggaagcaaaaagaaggctgagcagatgatacaaattgcaattaggagctgcaaattctaatccctgagcaaattcacaaaaaaataaaaactcagagatgtcaagatttctatcaatgagataacattttaaatgccacaaagagttgttaatgtcatcttattcactcacctgtcaaaaaatcataaaatatacaatctgccatgttttacttataaaatttaaatgtcaatcatagtacctaaaatcaacctatgtaatggttaaatatgaacaatgtatttattacacaaaatttgatgtgacattctcaaattcacatttgatattcactagatatataagactccaaggttctccagcttccttaccttcagatattttattagattacgaccttatatgacagacagcaataatagcaaacaacatcaaataaaaactagcttacaaaaatactgctagactaatgctccaatctctgaaagttaggtaaagtacctaaaactcactcttgtccagggacttctatttccactgccccattctaatttaaaaccccattttcaaggccaggtgcagtgactcacgcctgtaatcccagcgttttgggaggccgaggcaggtggatcacttgaggtcacacattcgagaccagcctggccaacatggtaaaaccctgtctctattaaaaatagaaaaattagttgggtgtggtggcgggcacctgtagccccagctacttgggaggttgaggcaggagaattgcttgaacctgggaggtggaggttgcagtgagccaagacatgccactgcattccttcctgggtgacagagcaagactttgtctgaaaaaataataattaaaaagttaaaataaaaaaaaaaccattttcttaactgatctgtcagtggccatgggctccctcagcatgctctccatgtgaaagccatagtaatgttttaaaaacatacatctaattggtcactcttctgtaaaaattccttcaagacttggcctctcattgcccttgtcaaagactcgactttttatcagggactagaaaacaacatgatctaactcctattctctaaacttcaacacttatggcccacaagccttctctcagctcctcaacagtactttggggggcagatgtcaaagggagacatcatagggaataaaggtacaccaatgtagcaacactttcaaccttacctacctgtgagtgggggaacactatgctttagataaaaagccgttaagtcctaatgctggtttgttgtgcaaatcaaattccttatctcaatttcctcacctctaaagaagggagactcattaaaaagatttctatttgaatcttcaagctgtctgatttcataactctttcaccacttattttatgtggagatcccagattcaaaagttctaccccaatctctaaactgatttggtgcatcaacactaagttcaaatattgcctttttaattcagtgtctccaccaggcatttgggcttttttggaaaaacaatttctccaataaagtctagataccctttcgacagtcatcctttggttcacctttgttaaaagcattatgtacttcactattcaaataccattctgttttgaaagctctgtctcagactcaagttacttatcctactaaagtagcctttgaataggttagtgttctcttagtactggcagggaaataatttagaaaatcataatcctaaaaatgcagagccagtttggtaaagacacactgtctatttgatttcctgtcatacgtactggaagaataagttagtatacagaaatagcttataatattctgaaattttgcagtgatgaaaacatatacttaagctattattttaaaaattcttaatttaaaattctggaagtcacctagtaacttaaattgtgtcaaacagctaataatatcatccacaccttcaaattctgtaccaaatgtataattactccaaaatgtcctgccaggcaaaatatattctgagaactttgttgacttactgtccacttgaatttatccatgaattatgcacctgtcttattgtaaagaaagaaaatttaaaaaacacatggaatgggctaaaaatccaaacatcaaggaaagtctacaaagaattgtcaattctcatcacttaaatgtttagtatatttctagagattaaaaacaaaagactggcttcttggaataagctgtaacttataaattggtatcatgtaatacatgtattttaaaaacgtttctttggctagacccttattttccctgttatgctttacttttgacttatagaaatgacttacctgtaacccactcaaaatatgggtttaaaaagtcagtacactcacatatatctgaataataaacagtattttgctcaattacttatctctcatagagaaagacaaaaaatttctcaaaaaaccattttaattattaatgacgttgttatataaaccatccaactttagtcatttcttaaccaaaaaaaacctgatgttctaaaaaaatacatataataaactgttatcatagtaatacttctattaattaacatgttcacattctgagtacaatgaaaatcaacatccacagtgacgatcctaaggcactgcaagattgggtagtaccagcaaaggaatataaattaactgtaattttaggatcacagttgtctatcactgtattcaaatgttccaaaaagtagacaatctttggatggcatgtatggtaaattgcaatgaaaacaaatgctacaatattttctattttgctttttgtctttttgtaaggatttttaaaaatatgatgtgttttggaatagataatgcttggtacaacattcaaaatgtaaaggctggcatacaatgaaaaataattctccctcccacccctgtccccaacttactcaatttgcctctcaagatgcaagcactattactagtttgtctatccttatacaaggaatatgagatattctgtgttacatacatatcaattatgtatcttacacaaatgctgtataccatctactctattctatacacttctttttctactaaatatattctggatgtcttttcatagtccacaacaaggtgcctccaaccccccccaccttttttttttttgagacagagtctcgctctgtcgccaggctggagtgcagtggcgcgatctcagctccctgcaacctccgcctcccaggttcaagcgattcccatgcctgcctccacctttttaatgactgctaatgtagctagttcttatgaatgaatatttgagcagttccttcttctgctattacaaacaatggtataatcaataaccctgtatatacatcatttgcacacatgcaaccgtatctgtaatataaattcttagagatataattcttgggtgaatgtgcatttaacatttttaaagtttatataaagtcttgtaacagtttctatttgcaatttctcattacaaataaaactaaatctttgcataggtttaaggccatttataattctttatccattattcaactgggttattgttttgctttaaatactttttaaaatgaactttttataacttcttatatattaggactatagctccattacatgagttggaaatttttctcccagtttgtcatttatctttttattttttttttcttttttgagatgtagtctcgctctgttgcccaggttggagtgcaatggcaggatctcagttcactgcaacctctgcctcccgggttcaagcaatttccctgcctcagactcccaggtagctgggattacaggtagatgccaccacgcccagctactttttgtatttttagtagagtcgggatttcaccatgttggccaggctgatctcaaacacctgacctcaaggtgatctgcccaccgtggcctcccaaagtgctaggattacaggtgtgagccaccatgcctggtcccagtttgtcatttatctttaactttacttgtatttttctttatatgcagtttttttttaatattgtcagattcatacatcttttcttttatagttctgggtttgaggtcgtacttcaaaggctttctgactacatgattaaaaatatatatatatattttatattattttatacatatataaaatattcccctaccttttctactggtagttttataatttattttttaatccatagacctttgatctctgtggaatttatttaggtattaggtgtgaggtagggcacaactgtattttttcagatggctatccataggccaaacaccacttattgaataatctgtcttccactgatctgaaatgctatctttttcatacattaaatttcccagtctttttgggtctatttctgaactttctattcagtttgaataccatgacacttaaacaatgtagatcaaaaagatttatagcatacttaagtttaagaaacataagttataacataactataggaaactgtaagatacagataaagtaagtattttccctagatttattcctatttaattcatttaacaataatttatttaaccttctcttccccctggcacatactttcttttgttaaggcgaaagttccaagtggccagctaagaatttctctggctttaatccaaagggatttctttcccccattttgagtaaagcaactccagttatttacttattgtcatggagcttctgagaaattccttcttaccccttttatctgaagttgggaggtcagagtatgataaagtctatttagcaagctgtctaaaaatcacaggttgacgccacctactcaaaaagtacatagccacctttgttctgaagcctagataacttttgatttgcttgattcccttttaaccacacaatggacttaaatctcaggttatctatattcctttatcatatccccagggactcttcctgcctcaaactgcccaccacacccaccacacaaagcatgaaagttttttttcattagtattaactgtaaccataatcaacaagtcaggctgtgggacacatggctggtaaccgtgcatatgttaactgtgataggaaaacgaggaggacatccttttacttctgtggtgctttccagaagtaagtaaggaaagatttctgcctggcacagtgctctgtacaaacactagactgcataccaaattgaaagagttaccaaagacaaaacaggtgtttgctgctctcaaataccatcacataaatgttaaaacaagttcagaaagtatcaaaaatttggtttcattagttcacaattttgagctatattactgctaaaaataaaatagtaaattaaaaactaaataaaaaatgaattggtaagtatctggaaatgaaaaataaattcaaaaaatgaaacaaactattttttattttataggatggaagatacaaatttgattttcagatcactggggatactttaaagaaaactctaaaatgttaagagtagattatgtaacattagtaaaaaaacaaatattaggtaagaggtgaagggaaaacaatctcaagaataatccataagatgacaatagcaggacaggagttctaatgaaataatacaggacccactttaatctcttaaataagtatgaaacttgtagatatatcctgaagcaaggatgtggccaatcttcttactaagagataataaagaacagaaaaagttttgcattttgaaaatcagcatttcttcttaccatcaatttaatgttgatttttttttagcatttcatagagttactgaactcagatcttatgctctgacaaaacgtatgataagggaaacactgttgcccattctttttatcatatcacacctttctaaacaaattcttttggggacatttaatagttagctgttatcagttgtcctctgttgaggacaactgtccaacttctcactgcagagtgaggaggagagtttaaagaagctttcaatctattataatgcttcaagacagaaaccagaagttcttatgtcctataactttgctgatatattagatttaaaaggcattccatttctcatgtatcaatctgatgtacgaatcaaatctataattggtacataatacattctctaattgaacccttttccctcagatcacttcttcactgctggcaactagcacattttagaacaaatccagtaactttcaacgccatcagcctaagatcccctgtttgaaaacgtctgtttttgaactatgtgccaaacagagctctcattctcctatcatgcatatttgtggctgggatgtggtgaactaactcacagttgtcagggacaaataccattggctcaccactcctggtttacttcctgctatcccacccactccccttagggaacatgttactggtgtgaagtctaacaaacagttgtcccaaagtctggtgtggattacaaataaaatctaagagtccgtttactaactcattaaaaatcaaggttaatttaaatacacccaaatatttgaattctaaacttagagtcatatatttaaagtaatatagaaaaccaggagaaactcatgaaagttggtgttctccttttacacttttttttttttttgagacggagtctcgctctgtcatcaggctggagtgcagtggcacaacatcagctcactgcaacctctgcctcctgggttcaagagattcccctgcctcagtctcccaagtagctgggactacaggcgtgcaccatcacgcccagctaattttttgtattttagtagagacagggtttcaccatgttggccaggatggtcttgatctcctgacttcatgatccgcccgcctcggcctcccaaagtgctgggatacaggcgtgagccactgtgcctggcctccttttacactttaatgttgtaagaagaatatgtttgttttcatactgtctgttataaaaaggattccaattacataaatccccagaatatccaaatatctgactgcagaatacccgacaccaccaatacatgaactctgaatatcctcattataaaaatataaaaatgattgtatttatttggcaatgtgtgtgaaaaatcataatgataaagctcctaatctttctaagttttttctcaagttataaaaaggtttaagacattctactcacatcagttctttattataaagcattacaaatattttggtaattgttacagattaaaatctaacagagaaaacacaacacaaccaaacactactacaaacttgacaatgttgcaataaatgacagtcctaatttttcttgatttgattataataaaatgaattactatagctaattttgttgactgaataacttacttcctaggcttatccataaaacaatcacttatctttaaaattatatatcaaacacccaaaatgcaaaacaaaaaagtaatgcaacaaaatattaaattaacagcaataaaaaatggcacactctcattccttaactatagctaacaaggacagtgtgacttggaaattttcataggattaaaaaaagttttaagtagtagaacaaattcaacctgaacaaaaacaattaaagaggtgggaaaggccgggcacagtggctcaagcctgtaatcccagcaatttgggaggcccaggagggcagatcacaaggttaagagatcaagaccatcctggccaacatggtgaaacaccgtctctactaaagatacaaaaaaaattagctgggtatggtgatgcatgcctataatcccagctacttgagaggttgaggcaggagaattgcttgaacctgggagttggaggttgcaatgagccaaaatcgcgccactgcactccagtctggcgacagagcaagactctgtctcaaaaataaaaacaaaaacaaaagaggtgagaaaatgtagtactatctcttttaatattatctatgtttctaaaaattcctttagtgtttatctatgccagaggcaaatttatcaggcattttaatattatttctaaatattattcaaaataacaaaatccggtctccaggaatttcctagtaagagcaaaaggacagaaccatagtcttcttccaaataagacacaaaccataatgtctataattttatccatcaaattttcccaccatgaaacacagagaatagttaatccagatttttggattttgctttggaatttgtttgatttccatgtattcagactgacatatatgtgaagcaactgggacagatgtaatgaaggcatcagaacacgaaaataacttttagaactgataaatacagaaccttacatcttcagtctgagccagacagttcacaagaaacaaaaagaaacaagaaaagcagtcccaaattctatttttcaaggttggaagaacactattaatatatttcactgcttcctgcttatctcagccactgccatcgactgctttaagctatcattctatcaagatgcccagctcgctgaagacattcctgactctaaggaaaaaacacagtttttaccacacactgtaaattaagtaccttattttcctgtatatgtttattttcagatgctaacaaatttcaaccaaataatcagaagtaagtttataaattcatttaacatgttttaggagtgaaacatgagtttaagagtagaactagcattgatgatatataaaataattaaatgtaaaaaatgaaacctgaaagaggtgctttcaagtttatgtggtttttatgttattaatttttttttacaacttgaaatctctactacattttcctaagtatatgccaaataaattgaaaaaaaaagcaaaaatagaatttaatcaaatagtttatggtgttttgtcttttacaattaaattactaaatttggtcccacaacttctgaaaaataaaatggaacaactgtgaactatactaatattagtttcatatattagaaagagtatccatttagttcctacaaaaaagtagttttgtaaatatcaaaggaataggatcctaatatcaattccatttgttaccatgtacaaatcagctattaaatgaaactcagaagtaacaaatcttttttttgagttttcatctaagtaactttgtcaaaattttcctgaaacaggaattcctatatattttctagactaggaacatctcacatttacagtgtgtgtgtgtgtgtgtgtgtgtgtgtgtgtgtgtgtgtgttttctttttggcagaaaatcttttactgaaataagactctatgtaaggattttcagtaattaaatgcttatcataatcctcaactggaaacattctcctgctggaaaccaaaacaaaaaaaaaaaacaaaagaagaaaatgtggcactagttattatcacataagaagcaaagtaactttttcttgaattcaaatgttgaatataaacttctgttaatgatttacacagaacctttgcaagtaaacctagaatcagaaattctattaaaagaatggtcaactaattccattagaaaaaggaaggtcatcaaaaaaaattaatgaaacattctctaccatcattcacaagggtgccacgttttttcttgaatatacaatgacttggagtcccactggaaagttgggaaaagaacaatgtaagtaatttattgaatctcaatgaattattttgaacaatggagtctttcttagatagaagttaactgcagataacacataagatgccctagagagagtgaacatgtcacaaactggaagtatctgcaacacatataactaacgaaaataaatatcaaaaatatgtaagaatactaaaaaaaccaccaccaccaaaaaaaaaaaatctgataaaaagtaggcaaaggtacaatcaggtatttgagagaggagtaaacacaaatggccaatcaacatataaaaataatgctcaccatcattcgaatcagtatcatacaaatacaataaaatgagacagcattttacaaccactggttggcaaaccttgaagtttaaatgacaccaagtgggtgtacccttataccctgctggtaaaaacatgaaacaatttagaaaataatttggaattagccagtgaagcagaaaaatatacatagttaatataccactcctaggtatacttcctagaaagattcttttgcatgcagccaggaaacatgtacaagaagtttcagagcagtattattttggatagctaaatatccatcacagataaaaaaattctgataaactcacaccattgtaaactacagagcagtgaaaaatgaataaacagccccacacatcagtatggacaaatctcaaaaacacaatgttacatcaaaaaagtaagttgcagaagcagatacatacagtgtaattccttttaaatatataatttaaaaacatgcaagaaaaacattattgtggatgggatgtggagtggtatactttctagaaggacagagggaataagactcagcataattaactacatgaggaaacacagggaatgccatcagggagatggcataggggtttcaaaaagaatgctaatgttaagtttcttttgctgggtagcagatacacatacatgtgttcattgaattaatatccctcacctttagcataaaagaatgatatatactatacacatatccaagttttcccaattttaaatattgaaaaaaatgggtacctgttcttgaaaattgtggaaaccaggaatgtaaggcagaaaagagaggtgtgatgtgcccagaagagcaaaggtggtgctcccactctgagaaagtatattagctaagtgatgtgtaactgctaccacggcatttcagctagtttgtaagggatggaacataagcataagttgatggctttaggtaacaatgaaaggaaattaaacagaagaggaatacttgaaaatacctgagagcatgcactggtggaaaaatgccaaagtagcctttgaaattggtgtccataggagggcggcattcaactctccgctctgccacctactggctttatgaacctgtggaattcctcaacaccttgggcttcagtttccttacaaaataacagtggtaatatctatcacgtaagtctcttctggatcaaataagaaaagcaaaacacctgacacatggaagactctcaataaacacaagtccaatctgaacacaaagttgaatcagacctaactatcatgagaatcatagaatgttatttttaaaatgagggacagaagactcaagtgctgtactaggtctcaaagacacaacttttatacaaatggccctcacattgaagatgtcttaatattaatatttataatgccttttaagcaaaaaactgtcaaattcctatttctctccttactcccatgacaagaaagatctaaagaaccatagctcataacatgacccacatgtgtaatttgcaaatcaaaaaactagatcgtaaagtgccataaagtaaaacaaccaaattttaaaaactggaagggctctttactgtcttataaaatgttttttaatattccaatacacttattaacactgcaagtaaaatgcattttaaatgcagttcaatatcattacactgtagtatacaatgtgtattaaaatgtacaagaattttgtggtatcgacactgaaagttaaaaaaagtatacaaataggtggatttcaaatacaattgttctcaatattgctttggagtcagctttagactgtattattcaaaatataataattgtattatccaaattctacacaagagtttaatcatcatttgtaccaaataacacagaatttattctttaagttaattacccacaaattgttactagtagactgagagacttctttcccccaaaaaatccacactttgataaggtcagttacttcccatgggctccaaaactcttaacattttcccccaatattcttctactagaatttttgccaaataactctttatccttttttctgtatttttaatagttgtgctataaatcataagaatacatctttttttgtagttgcactattttatcagtcattttctaaatcatgtatgatcaaaatatcatttactaaattaatctgaaaaagttctactctgctgcaattatacaaatcctactggtcacaaaactaataatgcaattataaactaacacttaccaatgtgagaaatcaagatttatggggaaatcaaaccaaaagcaagactgaaaaaatattcactatctattcttactctctcaatatcatagttgtaatcaagagcattcccctgccatatttaactcatgctaaatatacaattctatacaaatataaatactacaaaatgaagttctacatgtaccccattagtaaggattcatatattagtaataattcaaaagtctcccaaaatattgagaagtttttagtcatactattctgccttttaatcattataacaagccatgatgtcctaaaaaataagcatgtttgacacttcttcgaaataaaaacaaatatatcgacattcgcactatttgcttttcaattagcttcgtttttaattagcaaattctgaactagcccattttagaactgaaacaacatagctctttcaattgtaaagaattaaaaacagtgttcaccaatttgagatggtttggaaagcagacgtagtgggattacactttcacacaaatcttaacaaggaatagccaacacagtagttcctagttaagtagtgctattcttggaattatactgtttctcataaatcctaaagaaatatatccacagaaaacagtcgctttaccatggtgatcttggctaggatgcttaacctctaggcctcaaattctttatctctaaagatgagaataataatagtacctacttcacggggctgctatgacaagtaaatgaaataatatatgcaaagttgttagaattagatctagcacataagatcttaaaatgtcagctattgagctggacattttctttcttttctttttttttgagcagagtctcactctgtcacccaggcgggagtgcagtggtgtgatcttggctcactgcaacctctgcctcccaagttcaagcgattctcctgccaagcctcctgtgtagcttggattacagacacacaccaccacgcctggctaattttgtatttttggtagagatggggtttcaccatgttggtcaggctggtctcgaactcttgaccttgtgattcgtctgcctcggcctcccaaaatgctgggattacaggcataagccagtgcgtccggccaagctgggcattttctaatagattctcacaactctaaaagataactggttttccatataaacaggtacgtattgcacacatgcattttataaaagatatcttggttcagtaaataatagcatttgtctaagtgtctgttgatggctgaagggataaagaaaatgtgggacttttgtttcccactactgaggcacggggatccagtgttccaacccagtgggaaaacgcagcctttgactaaagaggagacccatgtaatgtttgaggagactgtgaaatacattagggagaatctctagctgccagctgagaggctcaatggcacctactgttctcggctgcacaaaggccaggtgtactacgtgagtgagaagattctgaagctggcactgatatctgatttccctgtgacctgcttcagaaaattcaccaaaacctacaagtttcagttgaacatcacagctctggattaccctgcaccctatgccaagtataaagtgtggataaaacctggagcacagcagtcctttctatatggagacgatatgttgaaatctggtctgagtcaaatcatgaaaaatacttctcctggccaggaagtggtggtggcagacatccctttgggttttggggtggcagccacatctacgcaagactgcagaaaaggagaccccaccgatttgtggtatttcatcaagcaaacactggtgaatatgtgtggcatgaagagacggtgacttaaaatgaagtcactgcaaggacttaacagtggtgtggaaaggcccagctttgtttcctgtgtttgtgtgtattccaccatcgggttgaattttgtcaacactatgacctcttcaggtcttcttagtttatatactatccatcacgacaaacacaggctggattcttcttgtacagaaatggctcaaaattggggtttcagatttttgcatttgtgactaaatattctgtttcgtatctgaatctgagggcttcttgttctgagtaacagattccaaaccgttggaactaaggccaagaatagcttattgttatctgtgataacactttgttttccaaactcatgataacagcatatggatttttatctgtttattaatatgaaagatagatactgccatatcagaacagtaagtcacatctgagatttcacaaatgaaatttgactcaaataataacagcaatttatagtaagtgttatgtggtgtggaagaaaaacttgggttcaaaccccagttctgccgcctaccagctaaatgaccttggatgagtcattccacttaataagcttcattttcttcttttaaaaaaaaccccacaaaacttaaaaaaaatagctataaccatctacctaagaatggtttttagaattagaagaatcatgattataaagcatgtaacacagtgcctgggaaatgacaggtgtcagcccccttgtcctttaaaaaaaaaagtgtgcatattacatacatacacaccaacatgtaatattattcagccttaaaaaagaagaaaatcctgctatttttgacaacatggatgaacctagaacacaatatgctaagtgaaatacaccagacacagaaggacaaatactgcatgatctcactcatacgtgtaacctaaaaaagtcaaaattcatagaagcagggagtagaatggtggctgccaagggctgcagagtggagggtcacagggagatgtttttcaagtggcacaaagtttcagttacgtaggatgaataagttcatgaaatctaatgtacagcatggtgactatagttcgagatactgtatcatatacttaaaatacgctaaaagagtaggtatttaagtgttctcaccaatgtaatggatatgttaattagcttgattgtggtaaccatttagcaatgtgtgtgtatgtgtgtatatatatatatatatatatatatatatatatatatatctgaaaatatattgtataccataaatatatatacttttaatttatcacttataactcaataaagccagaaaaaaaattttttaagctgagtatttgtgaaactatgaccagggatgggtatgttgatccacagtttagagtactgccagcagcatatatatcaggaaaaaaaaatgtttgttagttgaattaaagtccaatgagtctagagtaaatattaaatatagctcgtgcaaaatgcttttggtaatagaagttatattgttcatcaagtaatgaaatggaatattacctaagattttaatgagaaaaaagttaattttgtccaagcataactttgctgaataacaagcagaactgagggctctaccaatattatctagagaactcacatggagttgttaaataaaaaggtggggggggcggttatggatgctacagaaaaaaaatgaaatatcattttctagtacttacttggattagtatctctttcagctctaatattcgtattttaatgatattgatgcaattctccaattttcattttataaacttgaatgttctaaaatatttatctaatactcacaacccaaataataacatcttccccctttaagggtcatatatgtatttccattcaagagaagatgctaacaggtaggctgagcagggaaagaactaataaatgatatcagtagtctgtgagcccatttttatttcctggcatataatatatttttaatacattgaagagttgaataaatcaatgtatcaataagtaaatggggtacagatgagtaaaagataatgggaaagtgaagcatagctatgtctaaaaagttatttgttgctctgaaacttcatagttcaggtttctgagatatttaaagaaatctctctaaactcccaagattctgggctcttctcctttttctttccatctcaggcccaacctgaacctaccctcttacatctatatcctcctaccatgcctactttcagaaaaactgtctttgaaaaatctctgaaattctaacttattagccagccagtagaacaatttaaggtacacacttactagaacagcaaccacggttattttcttttgtgaaaactactttgggaagaagttgttaatactaggacctctacaagaattccaagttattattttaaggtaaggaaaggtttggaaagactcaggtccaaaccagcaccatgcgaatggccctatccctgggcatccacaagcatgaggcaaaccatccacctcaataaacatggaaatctgatgtcctgacgctcttagttccttcattcagggacatttataaggtctatgccttataacaggcactacttgtatagagtggattttcaataataaataacccatagtccttgaattacgttcaggaaagagtataaagtatgagaaaacaccatttcatgatttggaagatagattcacacagacactaaagaagtcagaggccataagaggctttggtgtctggcgtttatctccatgagtctacagcaggaagtagctcctgctccagattcctagaacccaacctggcaactggtatacatagagggtcagaaaaagtctgacaattatttgagaagactgtctaatatcagagatatttacctctttgacaccagtatggtcatcatcaccaatcacaattgtggagcattcccaagcactgttttgccacttatgtgtcatttcactttccaaagatcctaacatataaaattaagagaaagtaggggaagatgacagcatgtctaaacttccgcctgattagcatcataagtggcaagagttatttttgactcataagttattaaagatagtaagaatttcagcactaataagatcactgggggaaaaaaaccactattaatggttattatatctctatagtatatacattttattttctatttgttacatttttcccaaatagcaattacctttaaaatatgaaagaaagcaggcaaagaggaaaccagggtgcaaaaaggccaggtgatctggtcagcattactggtgggcaagaggcaggaaccagggatggcaggaagactcacttagcatctttgcactattagggaagaggtctgtgggtgaggtaacacaattatttgatcaatggctaaacagacaagggcccagcattactgggatgtattttcattgttagtatgattaagttaaatagctgcataagtatccgttttgacgatgggtttcttggtggtctgtgttgccacacagaccctacaggtactcaggtgccctataggtacttaatattctacaggtactcgtgtaccctacaagtactttactttgtacactatagatggtgactgtggagttgttctcaagtacgatggcaaacagaggaacaaagagatctaaataaaaagtgttaccctgtgacttctctaattaacactttaatttgctataatttctccttccaacttagcagaaactgcatgtgaaagctgaagttgtaaacagagtaggaactaacatgtgtgaatggttgagaacccattgggtagccaagatccctgaagatcttaggtcaaggggccaagacattctatatttttaactcagctgggttactatggaaagcaggtgatgtcattaagcacttggcgcacgaaactatgagctcttcaagtaatgtagcaatttgtgtataacggaaaacagaatataaagcccttgttaaaactttgtaaatgactctcagtttttcttgacctgatctgacgtttcaggggtttttcataaacacctgtttttatgcatgaatttctcttttcaaactctcagcaggtatctaaccactaaagcacattagactatttacacaaatagatcatttttagcttctgggctctataatggcacctaagaatgttcttttaaaattttttcaagaggaatgaggtacagcaaggtggtggtggaaggtgccctgactaaacttctcggcacttttcccatttctaccctaaaaggatgaaggattagaagaacaggaaagtcagtatcctgccagaacagggggtgaacacattagcccagtcgctggtgttttccctcagtgggctctctcgccaacagcttgtcacatcagaaatgtaactcagttaaacattaggccaggggatgtgcataataaactagtttccttgtctgaaaaataaaatgattgatgtggatgaactttcctgccccttacagctgagtctatgaaagaacaataatattctgaataaagacatatgtaccttaaaagaaagttttacatgaaaaaaaaaactcataagcaaattaaaaagacaaataaactgggaaaaatatgtgaaaactatatcacagaacagaggtttaagttatagaacatgtacaggaaaagtaggctagagaaatggtctaagctatatgaaaagatactcaaccatgctttcagtaagaagaatgaaaactacaactagactgagattccaattttcacctctaaggtggacaaaaattaaaaagttcaacaaaatctaaacaacatatcctgttggtgatgctgaggggaaacaaggccatgaatccccattctatgactctctcccaaagacattcaggctacatatacacccacacacaaagttattcactataaagtatttgtgttaaagacatggaatcaacctaaatacccatcaatgatagactggataaagaaaatgtggtacatataccccatggaatactatgcagccataaaaaacaataagataatgtcctttgcagaaacacatgtggtgctggaggccattatccttagcaaactaatacaggaacagaacaccaaatactgcatgttctcacttataagtaggagctaaatgataagaaaccatggacacatagagaggaacaacacacactggggtctttcagagggtggagggtagaaggaggaagaggattaggaaaaataactaatggatactagggttaatacctgggtgatgaaataaactgtacaataaagccccatgacacaagtttacctatgtaacacacctgcacttgtacccctgaatttaaaagttaaaaaaaagtatttgtattggcaaaagacaggaaataacacagatgtccacctatagggcaatggttgaaaaaactatggtgcatctatacaatggagtaccatgaagctgtaaaaaggaatgcagaccatctttacacaatgttctgcaatgatctccaatataaactgttatctataataaagctgcagttcaggtcaagaaaaactgagtcatttacaaaataaagtatgtacactgtgatgccatttacttaagaagttgggagggatataaatgaataatacattttttaataaaaaggataaatcaaaacaatgttttaaaaatagttacatacagaaggaaggtgaaacacagggtggataggtcagtaacagaggctacccttctctgaatattccttgttttataaatttgacttcagaaatatacaatgtttgctggagctggcttatattggctcttggtgaatgttcaggtattttgtgatcgggttttctggaaactgaccataccacggagatcagcaaacacatctccttcaccctcaggttggttgttaaacatatatccgaacaccagagaaaacatatgtactttatgaaagtataaaacaaattaaatttaaaaagagcattcataaaaattgaaagcaaaatgaaacaaacctaacagtgaattgagtgggcagtattaccacattgaatcaactgtgtcatgtgactttacagcacagtaatgcagctctagtgaaaataccaaaagaattgcaaacataatcaaacggcttatattttttttcaatattctggtacgaatattggtatttttattttgagaaattgtgagtatcatggaataaacaaatgaataactatattactggcatgagtactagggtttttagcatgggaccaagcagctacagatacaagattgaggtcattaagtaaacacctgtggtcctgaatgtgcattggctacatcagtaaaatgttatcatatatcttatatttaatgaacaccctgtgcatacgtttcttagctgttcactagatagaatgaccaacccagaagcaatgtgcatccctaggacccagacatccaggcactcagactgtggtttctatttcccacaaaagaaactaagagtctgtggagaaatgtcttattgtagatctgggccacgaaaggtacaaaacattagaaggaaagaagctataaaaaaaactactgggatcatggtcaaaagaactcaggagccaactggtagaggagaggctctcactggccaaaaatggggaaaaaattctgaacaatagtaagattaataagtgccacggactgaaacacatacaatacattataaactgaatgtttataatgataaacacacacactttcctcactacacctgtggaggatgctgggagcagcttattgttctaaatgctggtaaaggcatttctcctgctttttctatacacactgtacttcagggtaatcaaatagttgatgaaggggtgtttttctttatagagaatatcctagctaataaataaaatacaaatgataaaatcagaatatcatcattttataacctataataaaatattgactgtaggcaattaccaatgtccagtaacaccaaagagacaccagcaattaagggcttcctaacagaagtatatcataccactctctgtaaagggttcttgccaaaaaatgtatttgtgtgtgctgtatctgtgtgtgagtgaatgtgtgtatctcaaacctgaaatcagatgaaaactctagatttaactaccaatctccacagtagcaagttaagtgacaacaaattctagatcacaggaaattgcatgagacagatgacacggcttttcaacaaataaactgcaagggagtaaaaagtgacacaagacacctagagtaacaggtttagtccattttacactactataacagaatgccacagacggggtaatttatgatgaacagagctttattcggcacacagttctgaaggctaggaagtccaagaggatggcaccggtatctggagagagcgttcatgctgtagtatcgcatggcagaaggcagaagggcaaaagagggcaaaagtgtgcaagagagcaaaagggggccgagcttgcttctatataaagcccactctcacaacaactaacccattcccacaataacattaatccatttatgagggcatagtcctcgcaacctcatcacctcttaaagatcccacttgccaaaactgttacattaagaattaagtttccaacacatgaactttgggggatacattcaaaccatgacaacagggatatatgaatcaacctaatttcaacaaacaatttatcaatcaataaaaaatatatgtggatatgtatgtatgtgtttctatataatatagacatgtgtatacatatgtttgtgtatatacatgtctatatatgtatgtgaactacaggatttgatgatattaagaaatggctgattttttaatacgatgatgacattgttttaaagaaaaaagactccttctcttctggaaaaatataccaaaatattcacaggtaaattggtacaatatatgggatttacttcaaaatttgaaggagtggtgaatgaaaagagaattgagtgacagcgagttgagatcagtttgaatgacaggcatataggcatttattgtaactattctcactactataaaagacaagttttctgtaaaaaagtttaaaaagcatatgaacacaaataacaaaaaccaatgtaactaatattaacaaggtggtaatagaacactgatatcagactatacattctaacttaggaggccatcatgatcacctgaggagcttcatgaaaatatagtctttgaaccaccactattttaatgaacctcaaaggctgaaggaattgtgcatttccctcaggacagcaggagtggggaaaagaggctgagaaccactgtgtaaacactttaagggtatagaatatatattattcacccagtatttatcttaatgtctaacacttaagaagcacttaagaaacataaggtgaattaattaacgatccacagatgtacaaatgaataggcaagcttaatagtagctaactgccagatgtgaaaaaaatcattattcatatttgatatttaaaaaaattactcaggttatagagtttaaagagtatggctctctgttttgagtggaatgggtttccttcataaagccacagactagtcacttcaaacagctacaagtaaacacccagagtaaaaatagttttaaatacacaattgggtggggtgtggctagaaaatattctgattctacaatctgttttggacaagacagtgcttcttatgtgactaacaaagcaaacagcagtcagattccttgtgctgaaataagtacactatttgcaaaaagggttgaatgtccaaggcttattcaataaggacaccacattttccaaaactaaaggggagtatagaatgacaaatacccacatatatttacatatccctaaaagaagacatacaacctcctggtatggatttttttgtgtctctaataagtactaactggagccaagtctaccatctgaccatggagaacagcagaatacctcaagcacaggaataatctaattttaaaactgggaggagcttagaaaccacctagtccaaacttttcattgtgttgataaaaaacagacacccagagaggttaaagtgaaaggctctgaaaattgttgcaatagccacagatgaacaaatggtatacacaggggcatagcactatgtattaagagctgagaattagtcttctgaacgttcacgagtgataactaacagggtatcagtctcaattataagcaaatagcagtatgtgtgtgcatgtgtatcaccatatatacacacaaaatattaaaatatatattttaataattcctttcaaaacaaattcaacctagcattcaaaagcatccataaagttacctcacctactttttcaaaattgtgtccaaatgggccataagccaaaaggcaggtgttttctctcacttatcttttgtagtctcctacagatgtagcagagtacatattataattacaaaagctattccatatataatttccaaatgatgaattataaactttcctattttgttattctaaactgctataagaaacatattttatatgtatctatgagtattatacagagatatatacaacaatgtaaatttttttaatatggcaatcaacaaaatgcttacaagcaagaggagagaggcaatgagatgccttatccatttacatttccataaagggctatacaaggctttgtttaaaatacagaaaattgcttgaaggggagagaaagggaaaagaaaaaggacaaatctttagttcattcactggtcaaactttcaattatttcaattattgattagtcctgaatccatactactttaattctgtggaggtagaaaaatgatgtgtctatgcctgtgtatggaattgtcctcctcaaccagttcacctgcatagtcaatttgattttgattcaaaacgatgaaattaaataagatgaaaaatttggactctcaacttcccacctttattagattttttaggatcctaaaaactgattttaaaggcttcctaatattgttaaacagagtctaactaccaaaattgacaacaatagtgtttacttccacctttgagggaaagtgtttctaattgggatgattcctaactgcaagttaagccaataatattttttttaagctgaaagcaaagtttgaaaatttttttctcctgaaataaacacagcaatcttatgtaaattaacataatatgagattatcaaattaaggggtttttgcaaactctactgcaactctaaagtaaacccaaatttaagcaagaaaatctgaagtcatttactgaatatagcgtagtgttgtgaataagggatctaaatcctaaaagcctaaaagtaattaagaattggggtcagctattttcacaaaaatttatgaatattaatagacacattgataactttatgtaataactcaataatttagatgatggtctaaatccagtacccccttcaaggaattttatccgcttttatgtactaccacatattatataatatcaaccaattaacataagaatgtgcttttcaaaaataaaaagggggtatcatcattccaccgtgaaccagcctgaacactagagtattaattaataaaatagaatcacagacaaagacggtccttggttaaaactattaatatatatttaagacaatgggtttatttttaaataagaaaacaaggaaaaggagagcccagcccgatcttgtgtgcctacccaatagaactttccaccataattagtgcttaccaactttgaggggaggagcttaagctcagggtaacctcatgtagtaagggaaaaacagtataaataccactgaacagctcttgagaggcaccttctgcactgctcatctgggcagaggaagcttcagaaagctgccaaggcaccatctccaggaactcccagcacgcaggtaagcgtacgcttactggtggacttccatgttaacttgcttggaaagaaactttaaagatttaaatacttgagttttctcaagtattagaagtattaaagtgatttaaaaaatgggtttctactaaaatgcactccaaaagttctttttgcatcagtctgtggatgatagtcccaataaaaccatattgtaaaaatttgccctaatccgaatttcagtgtattttgaaactattagatatttcaggctatgtcaaagatcctagattatttaatacagacatccaatcctaatttctgtttcttttcctttaggtaaatcattttattttcacttgattacctgagtatagcttccaaaaataactaagacatatattcacataactaaaaaatgatctctcatttatttatggcacatattaaaaatatataggataggttaaaaaagtagataactgtataaagaactcatctgtgaaacatgagaataaaaaaataggttaataacaatgctgtataaagttattcttttctgtttttcagaatccatctgagaatatgctgccacaaataccctttttgctgctagtatccttgaacttggttcatggagtgttttacgctgaacgataccaaatgcccacaggcataaaaggcccactacccaacaccaagacacagttcttcattccctacaccataaagagtaaaggtaaattgaattgtatattttgttctattaacaagttgcttgttgctttctataatcttaataatctctttaacaaaatgcatttaactttggtgttactttccaacttctgaattagcccaaattattacaacaaagtgatctgtgaaaaaagtagaacaagaatatccaataagtgtagtagaaaggatatacttgaaaatatagttgaaagatatacctgcaaaaaatcagaacttttgtgtgtacaaatttttttctcagatgctgcttttgcacaaataactgcatgtaatccagaaatcttgatctaatcaaaactaatcaagtttaaaaattttaagctaaaaataactgccaattgtataaagaaggtagctggtttatttagctaaatattaaacatttacttttaaaactaattcaactagcccacaaacagatataaaaccgagtcttatcaaaaaaatctgatggcctcccccccaacaatgaacaaatgtaattatgagaattgccaagcaggcaaatgaaactgcaattctcataattacttatacattttgaatatagtttagcggtaaaatgcagagacttaactgtaatgcataagctgtgtgacctgaggtaagttacttgtcctcccatgccttagtttcctcatttgtaaaataaggagcagctatctcaagggctgctgcgaagtttaaatgaattaatacctgtaaagtgctttaagtgttgctattacttctactactacttctgttactcctagttttatttctactacttttagctactaatatagccttcaataagttaactttcttcttgaatctgttgcttacctgtccagttttcttggttactctttgaagattactgagataatatatgtaaagcactaaggttctcaaaggagggcaacttctaggcctcatattcactaattttatttaacagcaactgacacgaccgcctataaaatatctacagaataatataaactgactgtaggcttcaaactccctttccataattttttaattatatattttatactgtaaataaagctaaggatatttgttataaagtttaaatattatgcttttgggaacaaccattttgagcaatgaaacttatagaattgtctttttaagaagaaagatggaatttaaaatatttcacaaaaggaaacttaatatttgaaaataaatgcacaggtatacaacagatacttttgaatgtctcaaaatataaataaaaattttaaaatttaaaggctagtaaagaaaaaaataaaagacaaagcaaccttccgctttacttgaagcaacaaacacaatttgaaatgctatgacaaacagcactggattcaatagtttccatgatcacaaaaatcagactttttaacaccttaataagagcataacaaagtcttgaattaaaaagaaaatgcactattttagaaggttaaaaatactttgatcttctcttaatatacaccattatcttggctacttttgcagaacaaatgaaaatatcttaacaaatgaaaagttcagaagctgtatttaaactactaaatccaccttagtctctttttagatagacactcaactacactatcatccattggcagacattaatgcaccataacaaacacaaaagcccacagtctatacaagtaagacattaagttgaaacaggaattcaaagagttattacataattcctaggcatatccatccaacacaggttaaaaaagagttctgtcaaaacatactaaattatgctgcagaggattccacagctggtgggcagatgcacgtgccacattctgacacaaccaatcacgatttcagtttgtggcatttaaaaaacttaatagaaggaagtagtcgttttaccttgaggattgtgccaccctaatcttgaatgaagaaaattttttcagatgacaacctacaaacaggggctgtcccccaagcattcaatagaagccaaattctttctcgcactgagaagttgagacccattaggacaacattccaagtgacaaagttcgccctgtcactggagttccagtctcggatgacgcccaatgcactcatttccattgacttgtttctcctttttaatagtaaaacagatttccaatcagactaagacaattatttttagtgtgaacatgacccttataatcagattctaaagcaaagctcaatctaacatagttggcattttaaaaaatccactattttattcctccaacccattaaaaaattccttatttattcctctatttgcaatatatcaatatccacttatacataatataatcatgtatgtacactacaatcaatgaaatatttaatatacggaaatcttttacataaatttttctcacagtctttttcctgatgtcattttctgaaaatccatggggaaagctctatgtatttatattaatcaatgttttcaaattgaaatataactctaattagtaaaaaaaaatctaaatctgaaacaattattttcctatttcggcatatctattttaatgattcgctctgcatttatatacaccaaatgttttccaaatctcagaaacatctgtaccctgtgctttccccatacttgtggcccagccgcatttttcacatcacaggcactatgatttttagtttaagtttagtttatcaggtcaagtgaactcacagctctatgaaatcaaacactatatatttgtatttaggtaagaactttaatactattttatgtacctcacctattatgtctaattctctagttctttgtttcaattttaagtcaataatggagagtataagagctcagagtatattctgaggtaaaagtaaatcaaccaaaatctaacctgtgttcagcagaggcatggcagatgtaaatcagaattaattctgtttctcttttatgtctgacagggtagctttgggagggaaaatttttatagttcttaaacattttctcacttattctgcactgtctttttctgccttttctgtacatgattttcccaaaataaatgtactaaatttacctccactgcacttattctagaggaattcttcaatcctagctcattttcatgaatcactgtcatgggataaaagtattatggtagccatggttttgtgaaaccatcttctccagcagaattttttaaaacagtataaaacatataatctaaaaccatttcagactgttctgtctacatggaataaatgatgctgaaatatcgtgtcccaattcatagtttgaaaggcaatgattctctttaatgtcactaaccatccccttctatgggtgggtgtgttgggtgtgtcttttaggtatagcagtaagaggagagcaaggtactcctggtccaccaggccctgctggacctcgagggcacccaggtccttctggaccaccaggaaaaccaggctacggaagtcctggactccaaggagagccagggttgccaggaccaccgggaccatcagctgtagggaaaccaggtgtgccaggactcccaggaaaaccaggagagagaggaccatatggaccaaaaggagatgttggaccagctggcctaccaggaccccggggcccaccaggaccacctggaatccctggaccggctggaatttctgtgccaggaaaacctggacaacagggacccacaggagccccaggacccaggggctttcctggagaaaagggtgcaccaggagtccctggtatgaatggacagaaaggggaaatgggatatggtgctcctggtcgtccaggtgagaggggtcttccaggccctcagggtcccacaggaccatctggccctcctggagtgggaaaaagaggtgaaaatggggttccaggacagccaggcatcaaaggtgatagaggttttccgggagaaatgggaccaattggcccaccaggtccccaaggccctcctggggaacgagggccagaaggcattggaaagccaggagctgctggagccccaggccagccagggattccaggaacaaaaggtctccctggggctccaggaatagctgggcccccagggcctcctggctttgggaaaccaggcttgccaggcctgaagggagaaagaggacctgctggccttcctgggggtccaggtgccaaaggggaacaagggccagcaggtcttcctgggaagccaggtctgactggaccccctgggaatatgggaccccaaggaccaaaaggcatcccgggtagccatggtctcccaggccctaaaggtgagacagggccagctgggcctgcaggataccctggggctaagggtgaaaggggttcccctgggtcagatggaaaaccagggtacccaggaaaaccaggtctcgatggtcctaagggtaacccagggttaccaggtccaaaaggtgatcctggagttggaggacctcctggtctcccaggccctgtgggcccagcaggagcaaagggaatgcccggacacaatggagaggctggcccaagaggtgcccctggaataccaggtactagaggccctattgggccaccaggcattccaggattccctgggtctaaaggggatccaggaagtcccggtcctcctggcccagctggcatagcaactaagggcctcaatggacccaccgggccaccagggcctccaggtccaagaggccactctggagagcctggtcttccagggccccctgggcctccaggcccaccaggtcaagcagtcatgcctgagggttttataaaggcaggccaaaggcccagtctttctgggacccctcttgttagtgccaaccagggggtaacaggaatgcctgtgtctgcttttactgttattctctccaaagcttacccagcaataggaactcccataccatttgataaaattttgtataacaggcaacagcattatgacccaaggactggaatctttacttgtcagataccaggaatatactatttttcataccacgtgcatgtgaaagggactcatgtttgggtaggcctgtataagaatggcacccctgtaatgtacacctatgatgaatacaccaaaggctacctggatcaggcttcagggagtgccatcatcgatctcacagaaaatgaccaggtgtggctccagcttcccaatgccgagtcaaatggcctatactcctctgagtatgtccactcctctttctcaggattcctagtggctccaatgtgagtacacacagagctaatctaaatcttgtgctagaaaaagcattctctaactctaccccaccctacaaaatgcatatggaggtaggctgaaaagaatgtaatttttattttctgaaatacagatttgagctatcagaccaacaaaccttccccctgaaaagtgagcagcaacgtaaaaacgtatgtgaagcctctcttgaatttctagttagcaatcttaaggctctttaaggttttctccaatattaaaaaatatcaccaaagaagtcctgctatgttaaaaacaaacaacaaaaaacaaacaacaaaaaaaaaattaaaaaaaaaaacagaaatagagctctaagttatgtgaaatttgatttgagaaactcggcatttcctttttaaaaaagcctgtttctaactatgaatatgagaacttctaggaaacatccaggaggtatcatataactttgtagaacttaaatacttgaatattcaaatttaaaagacactgtatcccctaaaatatttctgatggtgcactactctgaggcctgtatggcccctttcatcaatatctattcaaatatacaggtgcatatatacttgttaaagctcttatataaaaaagccccaaaatattgaagttcatctgaaatgcaaggtgctttcatcaatgaaccttttcaaacttttctatgattgcagagaagctttttatatacccagcataacttggaaacaggtatctgacctattcttatttagttaacacaagtgtgattaatttgatttctttaattccttattgaatcttatgtgatatgattttctggatttacagaacattagcacatgtaccttgtgcctcccattcaagtgaagttataatttacactgagggtttcaaaattcgactagaagtggagatatattatttatttatgcactgtactgtatttttatattgctgtttaaaacttttaagctgtgcctcacttattaaagcacaaaatgttttacctactccttatttacgacgcaataaaataacatcaatagatttttaggctgaattaatttgaaagcagcaatttgctgttctcaaccattctttcaaggcttttcattgttcaaagttaataaaaaagtaggacaataaagtg

SEQ ID NO: 4 - DNA, 209602 bp, Homo sapiens
atatttggactcggctgcccgtgcccaggaatttcccgtcatgcctcccgccgccccgtccgtcgcccggagccggggagggagggagcgaggttcggacaccggcggcggctgcctggcctttccatgagcccgcggcggaccctcccgcgccccctctcgctctgcctctccctctgcctctgcctctgcctggccgcggctctgggaagtgcgcagtccggtaagttcgggctcccctcccctctcctcctcgcctcacccctcccaccccgaccctgccacgttagggtgtgaccccgagccgggattccattctgcgcctgctgcgccccctcggccacctgcggggacagcccctgcctcagccgagaaggggagcagaagggttgcgccccgcgccagcggtgaggggccgaacggaaggaggtcagggctggtttccccccacccgccgaagggaggcgtctggcagcctcactgacaccttatcctgtcccgggagcgaacctgaacccgcgggagcctctcgccccgcgcgggcccaggagagagggatctggcggggcagcccgcgggaggcaggggaggggtccatcccggagccctctgctctgtgcgtcgaccctgccggggttgccgctcagataacgggcccgaggcgtgggaaccggcccgccaggcctgcgcttttcgccgcgcgcctcggagaggacgggggtgcggggcggcgggcaggcggcagggaggggcgcacccgggagcgcacccgccgcccgccctccctgcgctgctgccccgctgctgggccagactccagcgggcccgcctggcatttcacaggccaaaatcgaacagaaccccgagtttgccaggtatcagttttgctttgtttttaagcagaaaaaggcatccaagtctatttttgaagttttacactgggctatttcgagtcaaactatatgaatgaaaagtgctgttcctgccttatttggtttagggctaatagctatcggaagtggcagttatgaagtcgttacagtaagactttataagataatcttcttgaatcatgtgggaactgttggggggaatttaatatcagattattattttaaaaagcagttattttaaagtacaaaggtagggataaaggtaaatgtgaaattgcatggacttttacgtttgtgatgagtagtcgtcaaagcttcttgcttcttaattttatcgggaatggaagaatataaattataattccttagagctgagatttcttaggagattttagtttgcttttgttttttctaccaatagactaaattgtcaaataagatatggcaaactaggactcataaattagttgaaacatgactctatgaagcatagattatattcagtactctctggtttatctcttcatattttcatttgcagcgctggtggcaagatcgattttcaaaaacaattttgtctataaaaaaacttcagggttcatataacttataaaattgtcagttcagattaatggcagatatttacaatatttaactttattcaatttgcaatttgtaaatagtaacttgagcagtgatatcagtttcatgtttctttctgcatagtattgtttttcaaaaaaaccctgttttttatagattcatattttggaagtaactttaatagcacttcttgggaaatacaacaggttctaatttcacatttttcaatggatttctaaaaaatactgtgctggatagtgaagagtggattttattgccaggaaacatatgtatgctttctttttcctcagtgatgtgttgacttacctaatacttgtggtgaaacggccttcgaagaccagaatccactgtactggccccttgccagtaattttgaacatcaagtttatatttggaccatttaaacatatattcttttaattccggtcccagctgatatatcagtctaatttctgatgacttttattagggccctatatgaatatctggaaatttttatattaagataagtagctctttgctacttatctagaattttgtcacagtgcttaaactgcttgtatggcaaggttgcagcatacaatgtaatttagattttgaatcaacacactgctttttgtttttaaaagtgcttgttctaatattttaactaagatgttaatccattaagtcagaaatccttgctattttgctcaactcaaaagaatatccaaagactatcccaacagtaaggttcatcagtttttctaatacatatgccatttaataattaaaaatagattttaaggccacgtgtggtggctcatgcctgtaatgcaacactttgggaggccagtgtgggaggattgcttgaacccaggagttcgagaccggcctggtcaacatagggataccctgtctctacaaaaattaaaaaaaaattagctgggcatagtggctcactcctgtggtctcagctacttgggaagccaaagtgggaggattgcttgggccagggagatcgaggctgtggtaagccgtgatcacaccactgcatttttggttctgtcataatctggtcacaatccctctaatttatctgcacctgtataattaatttatcatagttatggatttggttgatgaatttgattcccatgtttagcttctcggtaaaattattaagttggacagtttccatgtctcttctaactccaagatcctataatgttgtttttgtttatgtaactcttcagagccacctactacatgtggttcaaacttctgattgtcagcctgtgacttgctatacatgtcaaactggcctaccttagccagatgtgatgggtgtggtccagtgttggagagtccggatctgtctcaggattgtgttaatacctggaacatgcacaaagatacatacatacctggacagattccgtgttaagcttctatcactttttcttcctcatctaatagcagaaagtgctgattatgtcatagggtaaatgcctaactggtttttggggatagttaagcccaggccttaagacagtttgatattcagttttgttatttaggtctgggttagggataccgccagagagcatccaaacatttctgtggttgggaaggctagttatctgtgagcattccagatgaaatagcctataatgggttatcaccttttgatcttacctcagagaagattgaattggatctacctatctgatttagcagaattaaactggatttggatggaagggtaatcagctatttaatttgccagttgttagttagcatttcttcttgctgtatctcaaggatttactttgaatattctgtattttctctttcctgcccatgatgggttttccttttaaaatgctcagcacaggctgggtgtggtggctcacgcctgtaatcccagcactttaggaggccgaggcaggcagatcacctgaggtcaggagtttgagaccagcctggccaacacggtgaaaccctgtctctatgaaaaatacaaaaattagccgggcatggtggtgggcacctgtaatcccaactactcaggaggctgaggcaggagaataacttgaaccagggaagcggatgttgcagtgagccaagatcatgccactgcactccagcctgggcgacaagagcaaaactctgtctcaaaaaaaaaaaaaaattgctcagcacagtccctcatccatgttcatatatttgtctgtatagtatgctgaagtcatgtttatggctttaagggaagtacaaaaaaggaaagtatagaaaagatcaaacaaacgcatcgaacaattgactttatgaaagattttggttattgcctcatttaagcttctattgcagtaacagaaatgaactagttttagcaaaaaggaagaaaggaatttgttggaaaaccattggaagtcaaatgcaggcagacctcatttagggcctgagataagggactggaaaaatctagaacattccctgtctctagtttgcttcactgttttttctttgctggtgtttttttttttttttttctcttcatggttagatgtggctgctcagcagctcctgagtatttatgtgtcccttcataaggagggactatattattgagccttgatcctaaattcctgggaggtagaacctgatagacacagtttaggtcacatggttgacctagattttccctaaagtctcttctaattctagagtatctgatgtacgtagtacagccatgtagatggtttgattttgcatttttccattttatgttatgaggttatagtccttaaaatgaattgtgaacattttctctgataacaactaattcactctgcaaataatcatctgcatattttcaggaattcactgaataaaatgctgacctccagtggctctttaggataagttcattaaaactataagtggtagagatatttgaaacagtaatagcttagggactgagaatttatcagttgttttcctatttctcacacatatctaacattttctgtctctacctttcctttaggctgttcctactgcctggacctcttctctatcacaacaggttgaagtctttaaggcctctgtcagatggtagtttgtgacattttcttcataccacagaatttgtaatttccttgtgcttctaaggtgttttggaccatggttggagtacaagttttactatattgtcttgtgttgtagttaagtccatatatattcaacttcactaaactataaattccatatgtcagtgaatcacctagaatttttttttttttttgagataggatctcactctgtcacccagactggagtgcagtggcacactcatggctcactgcagcctcgaactccctagaatcaggtgattctcccactccagccttctgagtagctgggcctacaggcacctgccaccatgcccagctaattgtagtatttttttgtagagatggggtttcaccatgttggccaggctggtcttaaactcctgacctcaagtgatctgccagccttggcttcccaaagtgctaggattacaggcatgagccactgcactcagctagaagaattctgataggctctgagcatccattgttccaggtataacaattctgactttttcagatactctgatgcttttatggtatcctgcttgctgctgtcttcttttgaaattggagttcaatcactctgcttttctttcttaatacttgtctgtttcctagattttacatgcttttccatgaacactaatttcctgtatgaagagggaatatacaaatgataggatgctttcctgtaactgagatggcagggggaaggagaggacagcaactcatacagaaggaaatcagcttttgttgagcacccagaatttaccagatcagatagagaggacaggtgtagaagaaaatgagcatgtataaagtggaatagtgggacaataaagtacaaatatggaaaattaagtggaaggcttttaatgctgttagggaacttggattgggttagtaagttatgagactgacatttttgatccttgaaatgtcataatcagaggtgaattataggttatataatccaatagtttagataattaattaaattgggaaataagtcataggaccaataaagaagtgttttgagagtttctcttaaggaatgaagacctaacgagaatagcggcaccgcagtagaagtgttgctaaagtacattggacagaaataagcaattggatattgggaaagaaagggatgaataaaaggtgacatgagatgttaagcctgggtgatggagagaatgtgatctcagcaggtttgtgggtggaggtaaaaataagttttgttctagatctcttgcttttgaggtgctggtaggatattcctgtggagatgtgtagtagaatccgaagtgtgaaactggaacttggagggagagatcaaggctggaaataaaacatgtatgagtaaggagagttaaaaataaagagaaaaagagagcatttgttagctggagtaaaaggaagggtacaggaaaagcatcatagagaagagagaatttgatctgactttaaaagatgccgagtcggtatatggcattctgttcacgagctttccttgttgaggggacatcacatttactaacttgagagataatacatgggaagtgttggacaaaggatactgcatccagaatgacctttctaaactacaaaatcatttcccctctttcctgcttaaccctccctcagtggcttcttatctttcttcagataaaggactgactcctaaatgtcttcatcatcaccaatttgaacacacattgtgtctcacactcctcctcgttcctcactcttcttccccaagactggacagaatgtgaagaagatatgatttccaccagatggagtactctttatacttttttggggtcctttatggttactttttgtggccatggtcaggttcttatccataaaataattattgataacttcctaatgtaaaatgaaaaataatgataaatcacatacttccctcatttttacagaattccttgcttgccttatctcttcaagtgttgactgcaaggttcctgtacacttacttgagttggccactccggtcactataccctgatctctgacacttggccgtggtagcctggagcagcattgttactgggcattgctgtgattgggttacccagctgtgctgatgtggaaacctcagggctatttattgatacttggtttcctaaaggaaagttgagggaatgtattttatgagagggctttatttacacgattaaagaggtttataaaatgtggagatgaatataggtgaaacagagaaagaatgctggtataggaggtgttttcggctgggtttggtggctcatacccgtaatcccagcactttgggaggctgaggcgggtggatcacttgagtccagcctgggcggcgtagtgagacccatctctacaaaaactacaaaaattagctgggcattgtgttgcatgcttgtagtcctggctactcaggaggctgaggtgagaggattgcttgagcccaggaagcagaggttgcagtgagccaagatcgtgccactgcactccagactgggcaatagagtgagaccctatctcagaaaacaaacaaaaatccccaaaaaaccaggaagtgttttcttagggtctagttcccaggcgaatggtatatcctgattctaggtttataaaaatagtatattattcataacatttgtctaaagtgacacatttacatacagtatatagtattgagtaatttccaactctttaaaaataatggagaccctttcatgtagtagtaactatgtttttagtatctgttgactgagaaaatacgtaacagcaaaagctactataaaactttgaaataagttcttgtaaatgtaaaaaaaattctcatatatttggaaagtatacatgtggaaattatgacttatagagtctatggacacttgatttcttgctttatggatactctcaggaagttctggtctcaactttgagtatctcattgtcctcttactttagaatgtggggtatgggggaaaacttctatttgaaaatttgagccatagcggaaattttggaatgacagggaaacaccttctcagaatcctcttacaataaaatttatatatgttatgccagacaatgtactttatactaagactggacttttaaatagtctcatggattagaagtcagatacaataaataaatactttttaaaaattatatttttaggtatatgagcattgttgttgggactacagtgctattttaaagtgaaatttagttgatttgcatgtgagtatacacctacaggtctctgttatagccgtgacatgtcttctgttactataaattacataacaaatccttatggtttcttgggtcacttattttatttaaagacaaaaacatctttcagtacatatgtaagacttaaggcattattgaaaataagcctgtgctacatggtagaatctattaaaaaaaaaaaaacactcaggcaaggcacagtagttcatgcctgtaatcccaccactttgggaggcaaggaaggaggatcacttgaggccaggaggtcgagaccagcctgagcaacataggaagacctagcctctactaaaaattaaaaaaagaaattagcaaggtgtgctggcatgcacctgtggtcccacctcctctggaggctgaggtgggagaatcgcttgagcccaggagttcgaggctacagtgagctatgattgcaccactgtactccattctgggtgacagagcgagaccctttctcaaaaaaaaaaaaaaaaaaaaaaaaagcaaaaccaaaaaccgaaaaacaactcaggacagtctttgtataaattagatagccctaaattttatgtttgttctttcatttctcttttttttttttttttggctgccgcccaggctggagtgccatggcaggatcatagcacactgcacactgtagccttgacctcctgggctcaagtgatcctcccacctcagcctcctgagtagctaggactacaggcttgtgtcatcatgcatggctaattttttaaaaaaaatttatgtagagatagggtctccctatgtttcccaggtaggtcttgaactcctggacttaagcagtcctcccaccttggcctctcaaagtgctgggattataggcatgagcctccacgcccagtacatttcttttgtttttattgtgtttgattgtcagagaacctgagtttggttggggttgagagagaactatagggcctattataggtgaatacttattttatcttagattagtggtgtgtagctaaggaaaggtaaggtcatatcttcctgtaacagtccagattagatagggaaatgggtgaaaagccacaagttgttttgcaactctggtctcacagtaattgagagcaaaaaggaaaaagtgcactgtagtcccccttgtttctgattttgtggggtgtgaatatgccttctagtcagatcgccttagggggccaggaagaggagggttgagggcagagcatgtttacctgcgtgcagagccacttgaaaaattataggctcatttacatatttgcatccttgtgtatgtgtttgtgttgcaggggagtcagtgtagtattatgaaaagaacatttgacagtgaattggaaaactaggtttttctagtcttgtttttgcctgagtcgtttaagcttcttgtgcctcagttttcatatctgcaaaatgaatgaattggactgggtaatacctggtgttgctttaagattctgtaggctgggcatggtggctcttgcctgtaatctcagcactttgggaggctgagtcgggcggatcacgaggtcaagagattgagaccatcctgaccagcatggtgaaaccccatctctactaaaaataccaaaattagctgggcgtggtggtgtgtgcctgtagtcccagctactcaggaggctgaggcaggagaatcacttgaacccgggaggcggaggttccagtgagccaagatcatgccacagcactccagcctggcaagagagcgagaccccgtcccccccgcaaaaaaaaaaaaaaaagattctgtaatttaaggattattttaaagtctccaactttctgtaatttttaatggaaaaatatagttaatacagtatgcaaaattatgtctttttaaaaaatattttgttcaagttgactatcttgtgcgattcactataagtgttacactgcatctaagatcttatgtttgaacttcgtagcctagtgtgcccagtaatttgagctactggcaaagttacataacccttttaaagatttagtatttaaagaatagattacaatgtatcagaagcatcatattaaatatcccatctgaagtaatggtattaaggactagaaattatgtctttctaaatgtacagctgggaattgcttatttatgcttgacaatagatttcagatgagaaaagtcctcatttagcaggatatattaccattggaatttgcctctgattaccctattaaatatatttaactcttaaggttggttaatctggtcttatttttaaaaaaaacttcactgtgagttttaaagaaaaaaacttggctaatttgatgattttaaaaagtatcttctcttgcctgtaaaattcacttataagatttgtcctttttatgagagaatattttatacacaaaaaagaatatatagtgtctatataaggtataaagaatattttaaaaaaatctgggtaccctcatccagcttcagaaatgaaatgtgaaagatgcctgtgagacacacatttcctgtactcagaagtacccatagtcctatattttgtgattatcattgaacacaaataactgataaaccttgctttctttatagttttatcatagatgtatgtctctatatcatattgttcagttttgcatatgttagaacattatataaatgttattggccgggcgtggtggctcacgcctgtattcccagcactttgggaggctgaggtgggcggatcacctgaggtcaggagttcgaggctagcctggctaacaaggcaaaaccctgtctctactaaaaatacaaaagttagccggcatggtggcacgtgcctgtagtcccagctactcaggtggctgaggcaggagaattgcttgaaccgggaggcagaggttgcagtgagccaagattgtgccattgcactccagcctgggtgacagagtgagattctatctaaaaataaataaataaataaaagttatcatctgctgtgtatcctctgtgacctgcattttttatctttttaaattgtattttaggtgcaagggatacatgtgcaggtttgttacatgggtaaagtacatgtcatgggagtttggtgtacagataattttgtcacccaggtaatcagtatggtataggtaatttttcaatcctcacccatcttccaccctcaaataggccccagtgtcgattgttcctttctttatatccatgtgtactagatgtttagctcccacttagaacatgtggcatctggttttcttttcctgcattaatttgtttaggattatggtctccagttccattcatgttgcttcaaaggccatgatcacattttttatagctatgtagtattccatgatgtatgtgtaccatgttttctttatcccccacaaaattatgtttatgttatctatattggtgtatataactcatctttctaaaacttagcatttattatccatatgtttttctactttttaatttatttatgctccttggacatttatccattaggattcttgtgttttcctatggagtcaaatctgtattttctcctattactttcaagcttcattatctatatatttaataataatagtgatgataatagtgataataataccaaccacttacagatatgtgctatgtgtcaggcactattctaaatatttatttattacagttttatcaaggaagtacaatatcatcatgataaatcatatattaagattaaggactgaggcaagagtgttcagtaatttgtatgactgtgatttaatctggcagtctgactccagagtctgtgtttgtaatcattccactactttgactcctatgtagtcttttcttttaattatgccttttcccatttaactttttaagatatttaaacatttctatgacattcaaaagagaatggccctagtgtgatgttcaaatgggttctactgtacgacaccggttgctcaaagccatgacacaatgtaattttccatgattttgttctacaggtcttttaaaaattctctgggattcactattgcttttctttttcctaactggggggaaaagtatgccttatttgttatccttctaaaatatttcagttttttacttttggtctgtggtttggaattgattcccttgatttcctttgtgtgttcggactagtttcttcatatttggacaatgccctcctcttttgaaaaatattgatatgaccttagatgaatcacttaatcttcctgagctttgactttttcaagtaagttgcatctgttaagtaatgaatattttaaaatcagacatatataattgctaatcagaactccttttcagtatgaaataaccaagggagttcatgaggggaaataaagtttttgatagtgattggaaactactgattttacccaaacccctcaaattacagaagaaacattggcagagatgtaccacaactttgtaacacaactttcttttacagctttaattttttcctaaggtagctagctaattatcttttttcctgtattctgtggctttcttttttttttctttttgcgatggagtctcactcttgtcacccaggctggagtgcagtggcacgatctcggctcactgcaatctttgcctcccaggttcaagtgattctcctacctcagcctcctgagtagctgtgattacaggcgcctgccaccatgtctgggtaatctttgtatttttagaagagatggggtttctccatgttgggcagggtggtcttgaactcctgacctcaggtgatctgcccacctcggccccccaaagtgctgggattacaggtcttttctcttggtttccacagccagcttctgtggcttttttgatgtcttaaagtttttccaagctcttgggtaatttcctaatatcccttatttaaacatgtttaaatatctctcatcttaaaaaaaaaaaaagcctgctcaaacctgcccccacccaacgatcaatctattttacaagttgcttacatccttgctgtttctgtttatctgccatccttccaaaaatatgtattgagccctgttacatgtcaggcactaacttatctaatctgaggttacagtatggaccagagaaacacaggacctcattctcagggtctttcgttctcagtttggaaccagcatggcatgttgtagaaagagtaagtagactattttgtggtaggagcaagagagagcatggttagagtttagggcaaagaagaagaccagattatatggggcttttagatcattatgaggagtttagatagtgttctgtgtgatggaagccattagaggattttaggtaggcagtggcaagatctgatctgcattttaaaataataactccagctgctttgtgttgaacggattgtaggggccaagagtggaggcagtaaaccatttaggcctacttcagtggttcagataggaattgataatggtttggaccacagtggtggtggcagaactgagaccttgctgattggatataaagtctaaggaaaagagaagaatcatctatactattccactgaaacagttttggttgaagccactaatggtgttcatatcattgagcccagtgagctcaatttggtccctgtcttcctgacttcagagcgtttgatacactgaccacccattccttctagaaattgtcttttctcttggtttctgttattgttagacacatgattttaggcaaattagttatctgtgcctcagttttgtcacttatagaatggagataatattgtatctaccacataggttattgtaatcatgaaatgggaggatatatgtgaattacttagcacagtaattctcagagttaattcccagtaagttaactagcgttgtcattgtcatcgtcatcatcatcatcatcatcattctgggacaacactttccttgacctctcctttttttggcctctgctccttcttgatcttctttgctagttctttctccttcaactcacttctgaatgttgaagttctcagggctctgatatttacttttctcatttagtacactttcttagacaatcttatttattccatggctttagttctgtctgtatataatcaactgtccacatctaccgctcagcccagttctcaatcctgagcagaaagaggaaaagatgagcagcagccctgaggtaagagtgtagctcattgaagattgggaaagaagagtagtgtggtgctcttctagattttaaaggatttgggaagcactgccatgctgcctcttgaaaaagacagccaacctgagaaatactgggggcattgcctggaaatcctggatggcattccaatcagaaaaaagaaacttcaatatacagacagaactaaagccatggaataaataagattgtctaagaacgtgtactaaatgagaaaagtaaaaagtaaaagcagaattccatgtattcatttgcctctatattatctccatttaaatggctgtgtcttagataccataaacacatcacaagctgaactttttttgcctgaacttaagcctccccaccttgttacctagcttaataaatggtactgctatttgcccagttacttgagccagaattgaagtcctcttaaattttttttattgatctcatgtcctgtgtcatttctttgcctagatttctgcaatggcttcctaaagtgtctcaccacctttgttcttacaccgctcccatccattttccaccttttagtcatgtttctctttttagtttgcagatttgattatgttctccttcacttacttccctttctttttgggacgaagttccaaattcttatactggcttctaaggtttgcacctgtcagccttatcattttctcccctgctcctcactgacacctccaccacactgctcttctttcccagtcttcaataagctacactcttacctcagggctactgctcatcttttcccgtgtctggaatacttctttccttattcttaatctgggcaacagtcttagcctttattcttagtttaaatgttacttcctccaggaaggctttctcatgccccacaagctacagtacatccctctgttgtataggatcttccccactctgcttctatgtcatccttactgcacttgttcataatgtcttttgcttcactaagacgtaagcttcatggtggcagggaccatggcatcttgtttctcactttctccccagcttctgtttgttaaatagagtgaggaataaatgcagcatgggcatgcccattttggggaatgagaggccttctggctgggttggtgtgtgtttgttttaatctttcagtgtgacaaaagaggagaacagaaaagtttcagttttctgtaggtttactttcagagctctcctgtggcctccaggtagaggggaaggaagcagcatcattcgaaggcagctctagtaaggagatagtgttctggggttgaagtttcttttttctgattggagtgctatccaggaattccaggcagtgcccccagtatttcttaggttagctgtctttttcaagaggcagcatggcagtgcttcccaaatcctttgaaatctaggcatgagcattgccacagaacccttgtttcatatggcttccaacgtcagaagtgcttattagtgtctcctgttggatccagatagaccctgtgagttttaagctccatacctcatggcctacctgccctctggcctttcatcctatttagaatcccactgggaatctcctgaatctcactaacttgcagtaacaatatttgtgcatgagatgagttaggagttggccttttcttcaatatagcctctctgcacgatagcagcagtttttcaaagtgggtttattcttttagtttccaatgctgatgtaggttttcccctatttttatacttatcattttgatgggaactggtgggaatctgactgaggaagaacatgggtgagctctcttttgaaaggtacttattttattgccacctttgtccttgtgcatgtgtgcacatgcatgtgcgagcaatttgttttcctctttgctttaaaaaaatccttctaggccatttttttgtattgtaactttatatgagacattatttttaataggcacatttaagtcatttatattttatgttatggacatatttgatgacactctttgtactatagttttatgttctttttgtgattttttccaccttggttttcaatcttttgccatgtggtttctgtgggtttttttgttttgttttgttttgagacaaggtctctgttgcccaggcagggatgcagtggtgtgatcacggctccctgtggcctcgaactcctgggctcaagtgatcctcccaccacagtctcccaagtattaaatacctgggactataggcatgcctaccacatctggttacttttttaaaaaaattatgtgcagaagagatggcactatgttgcccagactggtcttgcactcctggccttaagtgatcctcctgccgcaactgccaaagtgctgagattacaggcgtgagccactgtgcctgaccttccatgttttattcacttttttctttcatagggtttattttaggttctatgaccttgaaaaagtatctaaaaacatcattgagccttacctaagtattaaattgaaaaagtaaaaaatgcagtagcatttgactcttttctacaggagaaacttaggattcttgtctttttctctgccttgcctttgttagctagagtgggtcctgtagatccacatgactattgtcgaatagttgacattctatatgattttgtattatacgttctcccttttaaggattatttttatctttttcattaaatcatacaacatttactgcattcagtgactaccaccacaacttttaatgttaatttaactatccttaaggatatttgattcatacatcatttggctaaagtacatttttgagttgatgtctcccttttttttttggtagggaaagatgtatggctgtttatttcctgagcccttctgttatctgaggaaattaaagactattatataacatgttaaatctcccttgcaaaacaacatttaattaataggaggattacaaagaagcataattgggaggctgtaaaattcctatatagaataacctaaaagcaaataatattttaattatggaatataaaatgttgctagcattctataagaataagaacctaggaaaaaaggaatttactacaaattcaggtgataaattatatcagtcacaaggttattgctaggaattcaagacctgtaatgtcatagataattctcagggtcacaatgcacaattagttataagccctagaacagatttatttttgaatgagagtaagcaatattggcagttttagttgaattgcaataaatgttttataatttctattgtgctattcacattggagttgaccagcagtttgttttgtcaaatactcattttattagtgtattttcttcatgcatacacaaagttacatcactctatatgattcattgaaatagttggtcacaaaatttgaaatttcttttttgtcaaatataatgatttctctgacagttgctaaaacataattgttgaaatggaaaaagtaatcttagttgagttgtctgttaggcaatcacctcattctttccctgtgcaaaaataaattaattaaaccctccaacactcacacgcatgcatgcatgcaccacagccacacatacattctctttctctcttttaaacttcgtcttacttttcaatctccataagggaagtaaaactcactgagcatgctgctagatgctttcaaaaacgttctctcatttaactcttccaaaacttaatgaagtacatgttatgatctacattatacgagtgaggaaacaggatctatagagatccacaggaagctgaggatcttagagagtaactaaattgcttaaaatatatcagctggttaggtgatagagtcaggatttgaacccagtttggactctttcctgtatactgcactgcctagacagcaatacaggataccctagtccctgggaactaggacactacgcacaaagatgaaggaaaacaggaagtgccatttgttcagtgatactaaaacatttattgagcctttattttacagaagtgaaagaccactgactactctcaaggagtttaaaagagaaacagatttatgaacctaaacttcaaactgcaataatagagatcctgaagtaggaagtagtgtggaggaagaactgattaattttctcatggaagtgatagggagaaggaagtgggggacaactgtgaaagaaatgatatctaaatgtatcataaatataaatgatttgtaaataatattctgcccagaagagataatacctaaactgtgtttgaaggttaaaaaataatggaatactatgcagccataaaaaggaacaagattatgtcctttgcagggacatggatggagctggaagccattatcctcagcaaactaatgcaggaacagaaaaccaaacaccacatgttctcacttataagtgggggctgaacaatgagaacacatggacacagggagggaggcaacacacaatggggcctgttggagggtggggtgaggggagggagagcattaggaaaaatagctaatgcatgctgggcttaatacctaggtgatggattgataggtgcagcaaaccaccatggcacatgtttacctgtgtaataaacctgcacatcctgcacatgtgccccggaacttaaaataaaaataaaaattaaaatagaatccattctgcatatgagatggaggatatgggtcatatggtgagggtagacaagactgtatgggaaactataaattgttggctatcatcagaacattatatttatttgacaaatatttactgaatgcctgctaaggttaggcatcgtgttaggtagtagaaataaagtaagggacaagtaagttcatgaagcatatagtgtaccagagagcgttgaggattgaggttctatacttaggaaaagaaacaaacctgatgggtcttgaataccaggatacattggttagatttctttcccctgtcctgtaggttctaatgagccatagaagcatgttatgcaggcttatggcatggtcagaactagtacacagcccttttgcagtagtgtggagggtgaatgtgaggggaattagattggaggcagaaagaccaataagaggccattacttatggtagatgggagatgaaagggatgtatttgagcagtatcttggaaataaaattgacagcacttagtattgtttggatatgaatggttacagtagaaaggaattggtggtgactccaaggtttgagattttagtgcctggatagatgggtctactttttttttttttcttttgagtcagggcctcactttgtcacccaggctgaagtgcagtggcctgatcttggctcactgcagccttgatctcctgggttcaagcaatcctcccgcctcagcgttccgagtagctggaaccacaggtgcatgccaccacgactggctaatttttgtatttttggtagaaacagggtttcaccatgttgcccagagtggtctcaaactcctgagctcaagcgatcctcctgccttggcctaccagagtgctgggaatatgggcgtgagccaccacaccctgctgatgggactactttctaacaaagaaatacagacagaataattagtgaagaaagaaagtaataaatgaattgagtttgggatataataagcagtttgaagtagatatggaatgctcagattctttgaaaaacatcttttaatcacctaaaattcacgaagaaaaacagtataggacaaagtagaaattttgcaaaatattttatttcttctactttatgatctcattcaggacttttcctctctcctaagcccaacatgatgtcaaaggatagttgatagaggtcattaaatataccttttagtggaatataaggagtccattttcataaaacttctcttttatctgctatatcagatgcaagccatcattataattttatttaataattttctattttctatggggagggatacaaaaattcagatacaagagcagatatttacttgtaatttccagtgctaaaactttttattccatgaatgggtggcaaagttctgacttaaaatatatgaaatatgatttaaggatatgtatttttaaggcttatatttagctcactaaaaatagtcttttagtgatatagatactgtagtttatagtcccaggcataggatttagtcagcttgcattaccaggttttttctttagataaaatggcccattgaggcactggatctttttttatgtataagctttacttttataaaaaacctgcacatggctcttggtacaggggaactaaggtgaaaaaaactacctgcaactccacctctttctatttctgtctcactcctctgaagtcatgttttaaaatcattattctagtagttactttcataattttggttaatatagttatagtgctatttattgatgcatcagtttcagataataaccagttacagaatataagtatttatctgctgtctcttcacctttctgtttaccattgttagactttaatagacaacaggctaagctgctctgacaaagagattacaagtggagcaacttacagaaagtagaagtttccctttcatatactagtccaaggttgggctggtgaatagctctgcctcatgacctgttaggtttgtcttcctcatcaagtgccttacttctcagggttcaagtgtgctgatgcagttgctgccatttctcaggagggaagaggaaatccaaagcaagtgactttgtctttaaaggagatgagctgaaagatcatacatgacattgagttacattccattttccacaacttagtatcatgttcacatctagctgcaagggaaggtgagaaatgaggctgtatgttcagttaaaatttcagggggttctattactaataagaagaagggagtatggattctaggggtcagttagcgttttccagtctagttggtgtcttctaaccctctactttataagaggaggacactgataccctgagtctttcctccacctttctttccagccttctttacattttgttgctatatagtttttgtttcacaatgtgaacttgctaatgcttacagtctgttctgaaatcacagtcaaatatttgtccataggttgtctctaaaagcttatattgttatgactatgtgcacatcgattacttccaggtcacaatgtgagctattaatgtggttccttctcattagttccagggtcatgatctcagctgttgaaagaaacagacatttttctatcatcatggcaaatggattgattttccttgtatttgttgattgatttaaaatcaaaagttgtatctgtaaggtctggatttaggcattgacttgctagatcactagctttctacagtgaatgtgcttagtgtccaataaactttcaattgcttcaggaaataagatcttcacatcgtcattttattgtgaccagaagctactcagtcacttttgcagctgaggaaaatctttagtttttggtgttgagacaagtttatgagctctgagtgatcaaagtcaagtagctgtctcctggcctttaatgtgggaatatgagagggcagccgtatcttctgactaaattaagaatctctttgggatatttaggatagaagggatgactaatgagagagaaactatagacttttggaagtggtctcactgtccttggcattagacttctcatccttccagactctgttgttttctaaaacaaggacatcaatctgggggcacaagggcccctgcccttgaggagtttggaatgtagtagaagagattaaaataaagtttagttcaaattctggctccataatttactggccatttaacctcaagcaggtaattctctaagcttcagtttcaattggaacaaatagcccccaaatcccaatggtttaaaatgctgaaggtttagttcttctttgtactgtttgttcactgtggttcagatgggagctctgccccgtatctccttatcccagaattgtgattaatggagcagccaccatctaattatagaacattgctgttccctgctgcagagggagagaaagccctggagggtctcacaccaacagctaagtactctggcttggaagcaatacacataatcatttctgctcacaatttattgcccagagctagccagccacatgttcctacccaaccacaagggggccaggaagtgcattcctaccacgtgcctggaaaatggagagccagaaatactgtgtacagagtaataatgactactacctataggagtacctagctcagggttgatgtgaggattaaatgaggttacacacatatatacacacacacagacacacacatacacatacacacagtacaggtgctcaaaaatgattattgttaatctcattatagatgtatacatgcaaatattaaataatatatatggagactaaaggctttattataaggttataagactatcataacatatacgaaaatgccttgtaaataataacatactgtgcaaatgcaagttgatatctagtagatgttagaagataaagcattagagcttggatcaaagttggtgctagacctttgtattcatctatcaagaaatgatggttgaagttgtaagaataggtaaaatctacacggaaattttggaaaacttgcatttcctactgtgagcttgacagcttctcaatatttaaaaacttttctgatgaaatcagtgatgatattaatgagtatggttttttgataccatgttacgaaatgtttcaacataagaaagatctgtataactcggtgaaccaatgttttccaaaggaacagtgcaggatgttacaaaatcatggaaggttagaaggtccattcaaaacgcaagatagaccaatgggttttaatgtaacagtatgagaatttcgttgatatggtttcagactaccatttgttgatcttcggtgtgataacaaaagaataaaacatacaattatctgaaaaggttattaaaatactcctccactttccagctacttatttgtgtgagtctagattttcttcacgtatgtacttcaaccaaaacaacgtatcacaacacattgattgcaggagcagagatgaggattcagttgttttctattaagctagataataaaaagagatttgcaaaaatatagaactctttccattatacatatatttttattttgggtaatatagttaattttcactataaatgtcatttttataaattatttaagctttcaggttaaaataaagttttactattttaagaatagtcattttgtaaattattttttatttatttttaatggagtaaacaaatatctaaaaagtttctcagctgtaatttttaataagtaaatattgatatttataatcatgtaaacaaaaggtatttggagcccttgataattttggggagtgtaaggaatcctgagatccaaaagtttgagaatgggtaaccgtaaagatatagagatgaaagaatacaaataaaaagtcttccttcatacagcttctctttggtaccaaactcccatatgtccctgccactccctctcctaaagctggaagcaattctctttcctgtgaaattctgtaattcttaatttctacccctgttaactcatttagcttatgtcccacttaatgttcccacttaagctaatgttttttaacagcacagactatgtcttacatcttttcatgttcatcagcacctgatacattgttttccatgtagtaggaatttatatagatgaattgagtaagttaaaaaaaattacctcttaaaatcacttgaaagatcgagtaagcattctgaatagccaggattctgtttcttaaaacaaatacaatcacaaaaggatctctgtttaacaaaaggaatgccaaattccagccaatgagctatggatttcaagcagtagctaaatggttgatcaattcactcaacaaacgccagttgagcataaactgctaggcactgggttgataagaacaaagatttttttatagaactttatagtagacacttagattagtggttctcatgatgaagtttcttctgtttataataagatgaaaaaatagcgacaatgaaacttctcccccacaaaactacatatattctacttaaaagaatgttttttatcttgagatcgctttcttagttgttggtgtcaacataatctttcttttcggatattatggtgagattagggctttgagcctttttttttggtcattatttgacaaaactcaaaactgttggctcctacagttctgggtgtggtggaggggagcattttactagcttgtgaaaaaccactgatgtagacattcctttggcatttattgggaagggattcgacctttaggtttgacactttaaaactactagtacaatcagctcatttattctggagctaattatcagctttgtgagttctctagattcctttttataccatctctttttggaagattagtgttcaactacggggaaaaaagtaaaagggaaaaaagataaaacaaaaccctagcagattaactttaatcaaatttttggatgttagaattcacgggggagatgaagaagtagagatttttgaccaaaatagggcatttgaattatttttggatttcaagtctggttacatttgcaacttcccacctcttcataggaactaataattttataatatattttaattcaaattattacctttaagcattattagcagttgagatggcagagatagaagcattggaaatgatgatcctgaacaatatagtcatatcctgaacatataatcggtcattttcatagtctttcactcaataaatgaatgactcaataaataaatgccgggtactgggatgcagggataaaagacactgtcactgtcgttaaggggtttataatctagaagagggagagatctaagcaaatcagtgccctgaaagttgttataggggatgtgatagcgtatttggtgctatactggggactagaattggaggcgttaggaatggtggaggttggaagtggtggcaaagatagtaaggatctggaacgaagacatggaggtgaaaataggaaacagctgacctattacaaaaattaccaccatgttagtatggcaggagtgtggggtgcggtgggttgtagaggtatggcaagggaaaaggctgaagagttcagcagcagctgagtgtagaactttagatactttagatgctttgtttaggaatttgggctttatcagaaggatttatcagaatgtgttctgggggctgggtgataggacagaaaggggttttgtatgatgagaaacatttcagaggcaccaattgagacgaagttaagcagccatatctattgaagacttctcagaccctttatattggttagcatttccatgactatttgactgctaaacttgtggaaggagcggctatattatgtttctcagaacatggtttggagaaccctgtgatatacaagggggaatcatcaaaatgttttaagcaggaaattatagacaattatggaatctaattctgttcttaacacataatgtgatactgctcattaggtattgtgcagtcagtatttttaaatgcccactattttcaaaattatctaccagatattttgggagattaggaagattcatgagacatcttgtctggcttttaaaaaaataacatgttgattaggttgggtatggtggctcacgcctgtaatcccagcactttgggaggccgaggtggatggattatctgtaaatgtcattcatccatgtagttaattgaataaaaggcaatgcgaaagtgaggaagttgagaataaacttggagaattatggattttctggtgatccttgctcaatgctgatttctacagggtgtttaatgctaagcttttgctttcaggactaggattgtttctggcaatggccttcactcagacagttcagggaatacaaacgggtgaaagctgccgaattgaaacttcaatttaggtgatctgagagtggaagtagctgttagtttgtttggtcctcaaaagtacattgtcaacattttgaagttttggtagattaacatagagttagctttacagattgtgaaggtatttccaaagaatttaaagaaaaagttgaagttgaaagcagttgaagttgcatgtggtggaactagaaatatcaagtctagaaatctgagaatgtcaagggagagaatcttcaagtaatcttcttcttttttgttatttttcttttttttttttttgagacagggtctttctctgttgcccaggctggagtgcagtacgcaatctcaggtcactgtaatctctgcctcccaggttcaagcgattctcctgcctcagcctcctgagtagctgggattgcaggcgcccaccaccatgcctggttagtttttgtacttttagtttcgccgtgttggtcaggttggtctggaactcctgacctcaagtaatctgcccacctcagcctcccagaatgctgggattacagtgtgagccacctcgtctggccatcaagtaatcttcttgaattaagtttccttattacatgttcgtcatactacctagtggggaaacatggaatcagagtatttagagttggttggtgcatcataaggcttttcattgccagttgtgtagtggtcaagagcactggctttggaggtgaatgtcctgagttcacatgtatcaatcagattacccaattacttaaggtccctgccccttactaagtgtaagaccttaggccatttacttaacctccctatgcctcagtctctgtgtctaaaaaggggaaaatgatagtatatacctcatgaggttgtggggattaaaagggctaataaatgtgaaatgcttagagcagtgcatggcacatgctgtgtgcacagtcaactgttatctttaggatttctctgttgtttgttttcattagaataatttactgtggaaacctatcaagtagtggttttctggcctaaataggattctttggagaatagcttgttaactctaagaaggagtggatataaatgtactgttacaattttctaattcatgcatttaaaactagcaaatatttggcatatttaaataataatagctaacatttcctgagcatatactatgtcccaggagttgtaccaagcacttttaaccaattaacttatttaatcattatcttataagtgaggaaactgaggccccgagagggtaagcaagttgtccaaggtcacagaattggctatgggcatgaccagcattcaaacccagatggtctgtgttcacggatcacacacatccattgtgatatcccatctttcatgcaaatatatgtattttagatctgtttgttaaagtgttttattttatttaccgcaaacattaattaggtggaaaacatgagctaaaataattttgttaaatcatttcagtataaaaatacatgttagagccatattaactatgattcttttgttctgtggaagtatgagtattagtttgatgtaaccaaggcatccagatgcatacatccattctttagaactggttttcactttatgtctcagctacatattttcagagtggtttatgagtaatgctactttgcatgcattttgcaaacttcaatccttttctactatccatgcaggcattaaaataattcggataatatcaaatcctaacctatgaaacacattcttttaggattagaaaatggagaacagtgtgacaaattgtgctttttgcattcttcagtatagaaagactagactgctctaaaagtagtcattttagttgccccactttgttggtgctaatgtatgtactttctgggtctattttcaaaaagctgggcaaaactaatttgccactagatggagccctggctatttgggtagaaatacaggcaacagaatattaaatcacacagtcatatcatgctggagggctcccggtatttgtggccctcaggttttaattgtagaatgcatctttgttctttccctgacctgcagagtgacatcactgcctctcttcctgtgcgctggctttgacataagccagatggccaccgtggttggtaggcgcccaggctgcctggtacaggagttgatgaaacagaataggaagacgttttatggtcagctgtggaagcacagtgagactgcagctttgctaagtaattacatttactgtgtgtgctttattcctcacagagaagggtcacagggaaaaaatacatttttatttatagtgttgtgaggtatagacctttgatcttttattagtcagtagtctgctccaaaggaatgctctcttttccctgctctgcagtcactcgtgaaaatgacatgtttatttatgtttaatggttctttcaggctgtgcattgtgatacttaccttccttttccctcctctttgtctgcagttagtaacacaaaaatgttttagtcttgtagtgagtttagtttggggaagtcagagttcaggcatgttaatacaagcagatttctgtcagatatactccagagtgatttagtaaaatatattactgtttattatatgtttgttcttcaaggaggtcagaagagtccggaacagactttttttggggcgggaagcaggggaagtggtcaggaaatgaacaagacattaattttatattaatttttggacatttaatggttaaagtcacttaaaatgctaatttgaaacaacatatatgaagtttattaatctagtattttccatttgcatttaaagttaatctttaccaattgaaatattgtaaaaaacttttaagaaaatcctaagaattgaacttttctctaaagtttaatatctacacaatttttagattcttccacataattcatttccaaagacattaaaaaacatttttacactttttgaattactaaatcatgaatattattcacaggattgacctagaaattataaatcatataattaaatgaaaattcatatttgccatgctttattcgaacttaacgctgttttgaaagtgaagtcccttaattgtccttaggttttctgggtctctattttataaaatgaaattctaacaaaatgtgtctcttaatcttattattttatagtcttctccagggagggagatttgccaataattgctggaagaaggcagcatggtgtaaggaaagaacatggctttgcagtcagtatagcagggttttttagtcctttttccactggttatttgctttgtgcccttggacttttgagtcacagtttcttcacatacgtattggggcataaaacctacctccttggtttattgtaagaattaaatgatacaacgtgtatattaggctccagacagttcctgtcacatggtatgaactcagtaaatgtgaattcctttcaactgtttttaaacttcctctcttttctcaacctcttgtaaactgtgttcacagattgcactgctatcatgtagtgtgtattttacctctaaggtacaaataaagctagattgaaagtaagctcacgggctgaaaaataggcgtttgaaatttattagcagtatgtgcatgtgttcagttccagataaaactgtaaccatcagttgtgcaatgaatgtgtttaatatttgtgatgttttaatttgatttttgtttttgttttttctcctactcagctcttgcccctgttctttgcttctcgttttgttggtgaagatatcacagtgatgtctgcattcaacctgctgcatttggtgacaaagagccagccagtagcccttcgagcctgtgggcttccctcaggttgctgcttgttgtactgtacatagtgaaggcacagggccaactgggtgtttctgctgcaggaaatgatacaccatcatgctttgctaaatttcattttcttttacttgggccctaatttgaagacggaaattggttataaatcaccactctactttgagtaacattcatttccacaatccttacaacccttggaacattgtccagtttccttgcccagtgtataattgtcactaatatttcatatcttcttgttctttaatgcacactacacatctgcaaatcataacgttcataagaggctggcagtctgagtaagaaactgccccaaatcacacaaaataggacattcatcttgttaaaggataatgaaaatgcttttcattccacatgtggtcattcctttaggaaaaaatgaaaatgaacaatgttagcatgattaagttaccaatttattgtagttaaaaagaaagaaagttctacttaacaatggccaaataaacagaactaatatagcatgcatcagtgggttcttaaattagaaccactgtactttttaaaaatgtgattttaagaatttaaataagtgaggcatgaaagtccaaaattttatatgcgcctgtatcataagcttaatattttaattttattatgaaaaccacaatggctaaatattttacttctgtgagcgtgattatcaatattatttacatttttccattagtgtacatatctatcactacattgtgtaaggaatttaattccaactcattagatgttaactatgcatgccaggcattgtgttaagcagtgaggatacagtgataaataaggtaaagctgatttttttcaacaagtacaaggtggaaatggaactgtgtgaggaccattaaatcatatgttgacctgactagactagaggtatttatacttggtgtgttatggtaattcagaggaggttgttcctagatcttttctttaggagaagaaatgttggaaggaagggaagatctctgaagtttaaggagggcattatggaggatatggtgcttgagctgaatctcagactggtagcacagttagcctggtttctaagcagggtggtggggaggccgtttttaacaaaaggagtagcatgggaaaacatgaaggcctgaaagagcaaggcatgttcagagaaatacagttattcatatggctggtttggatgtgcaagggcaaatagaagaggtaaggaaggaaaggtagccaaatcatgaagcactttatatgatgttttaaggaatttaagtcttggggagatgaacaggaatcacatgacttcatttgcattttacaaagattattgatttagtatggtaggaggtcagtgctggtttttcagatgtttctgtgagagaggctgggatggcaacctgattagaaggagtaaggtatttgtcttgaagctatatttaaatagcaaatacactttttttaaaagtagatcttatgtctgtttatggtgacatgaggggctaatgaagcttaatgtatagaggccccaaccactcttctcagtatgccccctagccccacatccccctgcactgccaccataaagagtactggaggagtgtgaggctggaatgacatgtgaagtgctgaagacttgactgtggccattacagtggagttgaaaagaaagattgtaattgggagagattcagactgtagaactgacaaggtttgtctgttgaattgtatacgaccttgagggagaacctcaaccactagttcttgtgctttgcagaaccttttcaatgctataccgtacatatcacaggtggactatggaggttatttagattatacataatgatgttttcctctggaaaaagctccaatgtgtaaaagtacccagcatagttcttgtaacattggtttgccaaatacaggggaggctaaatgtttatagaaaccacattaattaacagtgtattcttcaagatatgacagtcatggattaaagggtttcataatgagattgtttaactgaaatataaatatctttaaattttgataaaatgattcaaagataaattcagcaaagctgatagtttttaaaaaattaaccattatggtacagtgcttaagcacacaaattctgtatgaggtcagactgagtttaaaatctgactttgccactgactagctgtgtgccttagcttccttgtttgtaacatggagataataatagtaccaacctgaaagggttgctgtgagaattaaatagattgggatgtgaaaagtgcttaaacctgtggctggcatttagtaaacaccatatatgtcttcactatgttcaatatggaaattcatgtatctgtattaatatagatttatgtttttccaatacaacagacttttcaaacttttaaacatgtcctatgtttcatttaactattttttactttcatgggactcacaaatacactttatgtttgaggaataaccatcttgacctgttgttctgatctctttattttacttatgcaccctgctgaaccagaattcaagtcctataaatatacaagagatttcttttattcttactacccagtactggtaaaagcccaaagaaactctcatctttcttatctagggcttgtaaacccattttaatttgaaaaatgagttgactagaatagtattccataatttctcgaccattcaagcaccactagtttttaaagtgttatgaaagtcagtctttgggtgtctacatattttataacttggatttagcaaaatctgtatcatcatcaatttctctaacaggattttgctcttagatatatagaaatgttgaagaaattaacttcaacagtaatgaaacagactgcttaaattttgaaaaataaagatgaaattgaaatgggaattctagtccctattagtttgtacaggtagggaagagaagaggccaaaattggaaatacaggaagtgaaggtgaaagtttgaagtcttgctttaatataatgttgctggtcaaaacccattacaacagaaatctctgtaaatcaaaaagatgtctgttccctaaccagtaccctactaattttgagtattattcaatatgaaataattccagaactaaaatataattggagcaagctcttaaagttgattataactggattgacctgcatgaaggctatatcccagaagagtgatctattatttttcagctttgactttttttacgtcttatttttttaataaagtataattttaatttggagctttttaagtgcatctgagttatggttcactcatgtttgcaattaaaggtaatttttctctcgcagaatttcttcttaatttcttacaacagtttccttaatgtattaaaagaacactggattaggagttagaaaactctaaccaaagctctgtccttaacttgcgtgaccttgaacaaatcaataaacttctcctgatcacagtctcttcatctttatgaggaattaaaattagatagtatatttagttcttaaattctgtgattttattaactgtcacttgtttttacttttgactttaggttaatcagatcttaaaactcagtactaactaatgctgggaacttatacagagaagtctgctgagttgtggtgggaggacacagtttccatgtttgaacattagaattccttgcctcttaatcaagactgaagcattatctgaggaggaatcaggaagcccaattttatacatagttttaatgctagataaaaattaagtgtaattgtagcttagactagatatcatgatagctttcagccaagtgagggtgaaataaataaaatttgtctaaatagtactaattagagtgataaattatactttttttctaccctcatacatataatttgtggttgtgattcttatttgacattattggcatatttaatagtttccatgaattgaagagtcacatggctgtagcttataaatatatcatagttttctaatgtagcaattagaagtcttagagatattttgcaaatggtgttagaaagtcattgattatcatctgtataactagaactccatgaatcagcggcttatggctccagagcttaacacagtgcctggcacttaataaatatatgttaaatgaatcagtaaacatttggaatgtttatgtgtaggtgaagtcatagctgtaagagagtacaaatttatttgaaactcctttatatgggaagattaaaagtgaagttcatagtttggtttacttttgaatttattgtctgacaattttttctcactttattgcattaatacaatacaggggatgtcataggtataaatcacattgtagctaaacaaaaaacaaaagtggcaacagattcaatgcatgttatccagaattgcttttaccttttcttgcaaacagttttgagttttggtagtaaactgtttgaggcggtgaataagtacgtagtatacttagcataagacttaagaactctggcccttttgatcacttctttgcagcaaattattgtttgttgtgctttaaagtctccatttgtaaagaggaaatactacagatacacattaaagccacatccatcagtaacaagtacttattcaatttgagctggcaatagttcattaatagaactgatgtacttaaaagataatcagaatcgtcagtgtgctgttcacttactgaatgcattgactttctatattagttcttcagaatcttttttgggtcatgaaaaatatggacaacctacatagtgctttgataaaagttatgaccttcttttccagaaaagacatatatgcatctacacatgttttcatataatttcaagaaattttttgttaagtcttctgaaactcttcaaagggggttctttgaccacatattcaggacctctgttctaaaagatgcacatgaacccaatctaaaactcggatcagaacaccgtgtttctgatttctgtattggtgtccctaaaggaattctctcccttgtgttcagattaatgccctcagttctccagtttcaccattcttacccaacatctgacctaactttatcttacctaatttctttgattatattaaaatgccgaggagaggattttttttaaagaaatagaaaaaaggacatacaaatttcaacccgtaattcacaaaataatttgcaattagttgattaaatggtatccactttttccagtagatggcactaggtttacattctttcatagcatgaatgattattgatattagcacataggtgcattgtgaaaacttaaacaaaagtatataaggaatagccagttaagaacatatggatttataatccacaaatttttctgcttatattatgttcaaacaatatttgtagagcacaaaacctttttccattttcaataagattctgactcccttatgcttggccatctcattgaaattgtctttcatgtgtagactttctataaactgaaacaagttttcataaattatcttgtatccaaatagctgatttaacagtcatttatagttttatatgcagctaaattttcttcagcagaccacccaagaattaaagaaaatttcacattttgttttgctgtgttttgaatttttatagaatcttgaaaatgttattagtttagcatgttgactgttaagcatgaatcgatttttgcatgaatgaaaatattttagaaaactaagaaaaattatatttaaaatgttgattaaatgagtactctgatgcagctatatttttctaaaacaaactgttttagtagccctataatataataaagttttagttaatgttgaaaagttgctgtgcagcatctaattaccagatgaacttttaattatctgtgacaatggatattagttaaggctaaattgttatacaacaataagactgtatgaataagatgttgggcatatggtttgttaagtgtggattctcttgattttctggtaaatatggaataaattctttatataccttaagaattataaaatacataacacctagtaacaagagagtttaaataggcatgaaaaaaacaattaaatcttagttttgtttgagaaattcattagttaacaatgactgtacagtgtgtaaaacataaattctgaaaacaaatgataattctacagggttagaatatctagacaatatgcactttggaggaatcatataggcaattagatgcttatttatctaaacatattcacaataatgttatgtgacagattgtagaaggatttattaaaatgagctaactcttgctctcaacaaacacaagtttaatgaaggaatgagccatgaatgacagctcacagattcagtaatattgtgggtagatatttgatgaatttttactatcatcctttcctagtttacaatttcatcctaaacattttatttagagattgaatttctcataactgcttctgctaggtatactgtaatttaacattctttaaaatagattgtattaagatgcaacgataaattatctgaaattaccttttgtgcctttgcatttgaaatcaacgatttacttgaaaattttaaatccttatttcatttatttcaatttcctatatatttttattttttaaaacatttagtatatttacgcttgtattagtaatttaaaaatgcgtgttataaaaaatacaccatgaggcctggcgcggtggtcgtacctgtaatccaggcactttgagaggccgaggtgggcagatcacttgaggccaggagtttgagaccagcctggccaacatagtgaaaccctgtctctactaaaaatacaataattagccgggcctggtggtgcgcctgtaatcccagctacccaggaggctgaagcaggagaatcgcttaagcccaggaggcagaggttgcagtgagccgggatcgtatgattgcactccagcctgggctacagggtgagactctgtctccatctcaaaaaaaaaaaaaaaaaaaacccatgaaatgacaaaagatatcagttatttagatggttaataagagatatacttttatagagtttaaatttatgtattaacttttatgataagcatttctttcagtactagatgtatttattatattgagccacatagttgcaaggaaggaatggaatgttaatttttatcactagagtatttgaatttgaggcaagcaaagaaaattcagaatcctgtaactatagctttgtaggattttgttttgttgcagaaatacatgttagcgcagaaagataaaactgtttatattatattccacttgattaatgttttaatcttccttctgcaaattttagataatctcacagcaaatttcagagcttctcatcatattattggtattgatgaagaaagagattagacactgatctgtatttactagtttgtttctaccaccaacttgctttctggccccaggaatctttgttttgtaccttttattcctattctgcatctgtaaactgagaattttgtaacattcttgtcaaatcttttataaaagatatgaccttcaggtgagggttattgtattatattatattatattacatattagctgacattttccaaaagtttgttctgtgcaatttaagtgccttgttgtaagggagaagaaattggggaaaaaaagatgggggtggaagggaggacgccaaaaagtctgggaaatgtcatgggtttgatcaggcaaaatctgtttcagttatggaaagtccttggttcctgcaaagcaagctccagaaaggtagaaatttttgtctgtttagttcactgttacaattcagcaactacagttgtgtctatcacataataggtgttcaataaatatttgttggatgaatgaatgcttgtgaataagtaacatcatcttatatatcaaaataatgtcacattacaagtaatgtgatctctgctcttaagggatctacattctggtgagaaagatggccacctcaggttcaaattttattatctataggatgaaaggagttatatacttgaaggtttgacgattctatatgaacactttctcttttgttttaccattgaggcagggagtagaagaagtgagaagcattgtgcttctttcctcccagaatgtcagactggattctcggaataggatttcaagcaatgacagttcttctgaaggatattgaaggaatgtgtagatgtaattagtgggaggtggtaggagtggaggatgagaagatgggggtaggggtggattgtgggcacatgggttagcaatagataggtatggtagagtgcaaccaagcatgggttcaagagagaaacagaatggacaaataaactaaaggaggaaggctgcagacaagagaacctggctgtcattaaccaggtatgcaaccatgagtagtaacttttttgggccctgatttccttttgagggctttggactagaaattcatcatttcccaaattataatctgagggacactaattctactaactttcccttgtaaaatggatctcatcatgaaattgagaaaccctacatactaccctattgcataaattctaagatgcactgcttttaccattttaccatcttggtaatctggatgcagcttaaaaatcattgtgacaagaatgtattatagtttggccactttctccccgcctttttagtggagcataaaataatggggtatcaaatgaccacatatttaatagtgcacatcagcataagaaaatctctgagaaggtcttcaagaaacccatgtcacctagatttgcctaatctgatttgacagtggaacctttcccttctcactctgcaagaggaataacatgttagcatttttttcagagccagtgttttagagaatgcattttgaggaatgctggatcaggtaatcttatagtcttaaatccagagaattaatcaaatattagttataataaaagagttgaatgtgaaaccctagagaggtaacataggattcagagtagcaatctgaattactgaattaatgtttttactctatcattatttatgtttaaaatttcactgatttattaagcaaatgttattgttgctgtttttaaactaatttctaagaaacatagccaagatcattatttagaaaacatcttttagaaagaagatttaaatagcaataattaaagtggagaattgagtaagtatttaaatacaacatatacccgtttagtccttcctttttctcagccacattactaggtgctgaggatgcaaagatgactaaaatatgtgtgagcactgtctctcaagaagacattgaataatgtcttcccgtgtcagggcaagacatggcttttcttgataaatttgagtgaaaaagtaaagtggattttttttttctccagaactcctcagatttttctggaatatatagattcagatttagctgtttgttgagtggcaactgaagacttgttttctatgccttttgcttaattaatttatatttgaaatttgatttgggtggtaatgtaattttggaaatttgcaaagctgagtttttgacaatatatattttattttgtttctggtgaagtatactcaatgttacatttaaataaaatttgcatgataatctaagagagggctcctttccttcctttttgtgggtggttaccgctcatctccctagcagtcggtgctcccaaggggagaaggaggatgagagagcgagctattttttgcagatctttttgattgcatgtgaaatgtagaatggaaatgagcctgtctgtttttaatttttttttatgggctatgatgttctagtgaagacccatactggaaaaaaaaattaaaaacagggaactccaagtttgtcagacgtttcacatgcaatcagatagaattgaagtaaagtgactttctcttccactgttgtcacttgatgatggcagtgcctttaaaaattctcttcttatttatacgccttgcaagcaagaaaatgctctttggatcaagacattttaaaaatatttccctaaactctaggctttgtggtccacattaacacaaaaagtgttgctctcagtatttgcattaaattttgaagagttgataagatactctttagtttttttatggtgcttaaagaatactaataaaatgactactacacatgaattcaacaattaaaaatttataacacaaatgaaagatagaaaagtaaaatgtggcttctatcgtacagtcattcgggtgaattattaatgaatgtttcatcaggatgaatgtagtgctaaacttctattgtttcccaacaagaaaataatgtagcttcatgaatgagattttactattaaggttagaactttaaaggacgttaataacctttcagtactgtgaaaaatacatttactccccttgacttacagtaagaaaatgtttgcacatttttccccttaattttaaaactgccttacttctcagttccccaatttctcccttttcaaatctgaacctacattttatcctggtttcttttttggtttgttaaattagctgctactcttacatgaaagactgcatacttttcatcaggatagggtaatgaccaccttgacttgtgcacatttgatcatactatatctattgggatgtctagatgtagttttctgtttggatcttttctggcaccctgtgaatgctgttggtattatttgagttttctatatttcatttataagcagatatgattaaatctaggtgggaaaaattttaaagtgttaacatcctttttgttaactctctttacacaaaactttgcacatacctttactgtaagactgcacattgtatagattgtttttcttatctttcctgctaaaatatgtgttctcctagagcaggaacactaccttatttatttttaactttccagtgctcatcacagttcttgattcactgtagatgtttaataaatagttgtagaaagtataaattaatattaggctcaacagtttttatcttcaaagaatttacaatgtgtttgggaaaataaagcagaaatgaatgaagatgtttgagaataattgcataatactgtatttgcccatttaagtagtaccttgcagagtaaatacactaatactaaaagtgctgatagcggtgaacttatcaggatgtgtagccttggaaggaaaacttgcttgacaacgtcttctgagtgtatttattcaaaccttcagtatgagaaccacactgaaggccatttttatcattcaactatgcagcactaaaacatatggtcttgtttaattcaagaagtttacaatggtatgttgccttggcatgcttataatatccattgatgttaattagaactctgtgcatacatctatagaatataattgaaactgatctcgtggaattgtcttatgtgaagtaaaacagcaagaaggcattaaatgtgattattattatgacatataaagatatgatttttcttacatatagaaaagaacaaatctttaccttaagaagaaacaattatcttttttctgagtcctagaactcatagatttgtttttgtgtgtgttatgtttagggcttggagaacagatgaaataaaactgaaacaaaatgtaaaaattaagaatgttttttaaaaatagaacaggtactaattttatactttctttggttatggatgtttcctgccatggccagaagattactctgaaggggagagttactggagtgtttcagaagggcaacagcattgtttggccaaagggttttttgttctctaggctcatccaaaattcatcaccagaaacagccattgagtatcctctcagatataactccaagttgagaatgatgatctgtagtctaaaaaggatgactttaagtggacaaagcaaattagcagaacctgcactctgatcatacgttgaaagttcagccagaaaaatactttccgagagctattttgagggtagcactttgctaaatggatattcactaaactttctcttggaagtaaaaaaaggtaatgctaaacaatgcctgtattaagatacgtagttgtaaatttcctggtttaaaagcatatgtcttatatatttaaattgttgcttatctattcatattcaggttttagcactttcactgaggttacctgtctctgtctctgccactggaatatgaacttgttagtgttttcatctcttgcattgatcattcctgccatgtgttcggaaagctcttccttcagagatcagcacagacaccttcctctcctccttcagggctttgctcaaatatcacctcagtgagacttctttggccactctatttaagattataatccttattcctttcactcccagtcctccagttttcctttttccttcctgaatacttaccaccttctaagagactatataatttacttacttattttcattgtagtttgtctgtcttcccttactcctgctggaatgggagctccaggaaagtagatctaagtacttagatctatttagtactccaggaaagtatcctaagtacttagaatagtgccagcagataataggtactcaataaataattattgaactaatgtatatatcttacttagcatagtgtctgacactttgtaaacactcaacatttttgatgacttaatttaagaaaaaatcttggatcagtggtcctcaaagtaaaccctgcagctctagttttgtggaaaccagaggactgaagcaaaagtgtcctgacatcttagactgtatgttaatctcaggaatgtttttcctatatatgtctactttgagagaaaaatcagaattaggtatggttctacaaatataggagcttttcttcctccatgctttgtaggtttgtcttatcttaaagcctttattgaattactagaatgcaaacaaacaaaaaatgatagttatggtatatattttatattttattctaaaaaatggtctaaatttgacttttccaaatggccaattatttagaaattctaacactatactatgcctgaagtaaaaatttgcttagttttccagtgacaaactaataaccaaccaaatttacagtgaaaaataaagtataccacctttaaatatagcagcaaggtatttcaacatgaactttactgttttaacctactaaactcaaagcaaaacaagacattcttatctcttattcatttattatcttgggaaaatatttaatagtttcgttttttctgattctagaaccaaaattaaagttatgggatccttaggttttgttttgttttgatttttcacaccgaaatataaaatttatgacttaaaagtactctaaggtttaggtaacagatctaatttacttcttaataggaagttaaaaaagcctttcaacgtttcatagactttgtgagaatcctgtatgaaacttgtcactgaccctatgttgaaggagtaaatacagggaaaagagacattggctaatagataaatgtatgtaacttttctgatgtactgaggtgattattactttttcccccttattattttgttagtttttaagctgaaagttattgtatagttagagaagaaagaagaaaagttgttacataatttttcctgacaaaatatgatgactggctgggtgtggtggctcacacctgtaatcccagcactttgggaggccgaggcgggcagatcacctgaggtcaggagttcgagacctggccatcatgtcgaaaccccatctctaccaaaaatacaaaaattacccgggtgtggtggtgggcgtctgtaatcccagccactctggaggctgaggctgaggcaggagaatcgcttgaatccgaaatgcagaggttgcagtgagctgaactcacaccactggactccagcctgggtgacagagcgagactccatctcaaaaaaaaaaaaaaaaaaaaagaagaagaaagaaaatataacaactatgagttttgcagtcagacagccctgggtttgagttgataagtctacttgctgtttgtccttaataaggtatgttataacctctccacgcctcagtttctgtatctgtaaaatgggcatgacagccacgttctagaattattgagaagattaaatgtatttatgtgaaagtgcctagacatgtgcctggcatgtaggaggactcaaattttagttttattttcttccttcatttcccactttaatcataaaaacaagataaggtgtgaggaaaatactgttcccagggaattattatagaaaaagaattaccaataaaagattgctgcacactaaatactggacctggctatcttttaaaatacaattttaacctcagaattcactgtaatcaaaatgaagtaagtgctaatggctgtgatccttatagcagatctttgagggtggcaacacatagcaaaggtgacttgcttcaggtcacgtggctgggaagcaggcagagccacaaagcaaactgttgctgtacgtttatttgtactaatagcaagagcttcatactggggcttcgaaacaatactggccttgaggcaacaacacaggacaagcttcgctataaaaagagactttggacatatttcaataaataaaatatccttggactatgttcaagatggaactgatctatctcaaagttactctgtaaggaacggtgttatgattagataccaaaatggcaatattatctcctcaaatatgtaattgtgttacatgtgtgtacacacacactcacttgtgccttcaaaagacactattaaacatttaaataaagggaaaaatctttcccaaacatacttctaagccaatttagaggtcattgaacagatgtcatataatactaatgttaaattaccctgtgtaataagaaaattacagtacctaagtgaagatagtaaagggaaaccatccaatgaattactccagaatttcaaaatgaaatgattttttcaagattaacagtggcaccatatgactttagaaaagtgagtctgatagggagaagggaaataagagacaaaagtgaagcttttctgtgtttatatataccaatatttggttctgatgatagaagggctaatgtaatagtatagctttaaattgtccaggaagtatattattattattaaatggtgtggcaagatatttattaaaatctgaccaacttctcattgaattgtttaatgtaaaatcacaatagttgtttctagtctacatatatttccttttggtattagatatactttgaaaacctaattattttgagaatatagtataaccaaagaatgaaaatgtacaaagtttgacaactttaaataatcactagtatttcttaaaggacaaacctcacttacagttaggaaacaatatttatacttaaggttgaaaagccaggatgtaaaaaaattttgctaatttggaagatgacctttaagtgcaccaaaaccaaataatttgtaggctatgacatagggcacattcctacaaaatttgtgtgaatactgctttagtggttcttgaaagacaaacaaagaaagctggaatgaaatctttattcccctcccaaataagacggagactaacaaaggagtacagcagcactctttcaaggcttgccattaaaacgaggtctctgtagcacagttaatgagatgtttcatagtggaaaacaatctgtttttaagaatgtttagatcaaaagtaatttctaatctatgaaataaagtctcttcaatacccttcattcactagtaaagcttttatgtttgtattatttacttcaatcagatgttttcaattttacctttttttcttgtacaaatacttgacatggttcatcaatactgaccaacggttttattctcttcggaaaagagagattcatgagagagggagaatgaaaaagagagaaacatctttgcctaaatgatttgcaagcatctgtgctttaagctactttttatgaacactccttagtaaatgactcaaggtaaaaaggcagaaaagcatccaatgttaggaaattgcaatccaataccatgtaatttaaacctgcagttgcttctcttgtactaaatgacatacagatgggtagcttagttctctcaactttgggaacacaattggtctttttgtatgaatgaacgtatattaacaaaaatattttggatagaattgtttgattttaattgtacatattttaattatgccattgaaaagaataattttaaccaagtcattttgtcatgttaagtttgcatttaatgattttgtgacagtattaactaagatacaacccttccaacaaacacatgagaataaaataatttttaagaagtctgtactgaattaagcagaaactcacctatcactgttgactgattatttaagaaagagccactttgcattcaagctattgagaggcttgttctgataggacagacatttctcagggaaacatttctacctaaccgttgataacagcaaaaatacaagtagtaggtatttggataaagcctaggataagacggggtccagtgagatgagagatcaacatgccattagtgacatgcctgctgtgcctgtggatctttgcaggccagggaagggctgaagtatttgtggaaggtcagcagaggtgctgtctgacaacctgcaggcccactccaaggtgtatcttgctctttgggtctggcttgctcttttgctgcctccattttctcttgtggagaatcaaccgctctatcttggtggcccggattctgcaagctgatatccttcttcaacaccacagtcagggtaaccggctagacaatattttcctagtttaaggtcagcgatctcatactatgacattaggtaccttgaacgtaaaaaaaacgggaagcatttccactcctaatcatatttctttatatttcaaaagaagttgcgtttagtatttgggaaactaagcaagctttcttctagtaacttcaaaacatggcaagaactctctacatttaggaccatctgcaggcctctttcccactgtgatggatggcaaagaaaagcaattttactgcagtgagtaatggctaccctgtcctggagttatatttcttttcagtcatttgctcatgtaaaataaaatactacatataaacaggtgttgtctgaacattttactgcaggctgtataggttgaaataaaagctgccattgttattagaatcacattagaattatttcaccattcaaatacagttaatcagtaaagtcttcctagatatactttgcaaaaagaaaatgtaggtttctaaaaatattcacatttccttttttctttgtctttctccctttctgtttttcccactctttctttggaacttcttgaatctgcattagtgaaaatgccttctcctgtagtttattgaaagtttcttgctgcccatttaacatggtaagatacagtctttgaagagatatacagaatctttatactttgaaggagtatacagaatctagtgaagtttctgatggaatcatggagaacagtaattcctggtcatagaaaaatatatttttagggctcaaaaataggatggtagttaaatcatccacaatggaaatggaattttgatggtttcaggctattctactaagttgcaaaattattgcagacttacggtttaacataatatgcccatcattttatatatacagtataaatgtttgtaaatagacttatgcttttgaatttatttgaaaaaaaaagggtttcaggatactgggagttataaagcatgtaccttgtgaatgatcagtgaatttttagtatcacatgctagagactggctgtagcatattgtcactgctccagtggaatcatctgaatcttaagaaacattcattttaaacgtagagaaataatcagctgcagttcaggtaagcatttccagtgcattagagactggtctggtcattgacaagtgactgcagaagctgtgctgtggcggtcagccaaagcaattatttaggattcaagctaaaaaggcttcttctcccatatcctctctcttttcagggtcgtgtagggataaaaagaactgtaaggtggtcttttcccagcaggaactgaggaagcggctaacacccctgcagtaccatgtcactcaggagaaagggaccgaaaggtaaggtgagctttaataaaaagtcattaagagctagatttcttctccccctgccctctgcagtgcttttccttgccaattaatttaaagcattctatacttacttgctaaagtctatgaattagtatccttgaaaaggttaaaatggtgttgtttaggttaagactaagttttatttgttcttttctccatttaatgaatactgcatatctgatataaagtcacaaagcttttgttaagggcctgtttttagtttactacaaaatgtgtggaagtaacagcgatttaggtacattttttgggaagacatcacagtaagcaaaaccatgagggacttggcactatgccaggatgctgaaattttgaaggtggccattgtaagtatagacgttttggctgcaaaaagaaggtagcataatttagttcttttctacccaactccaatttctttttgaagcacatgtggagaaagtatttattggctcatttgtggttggaatgtcaaaaattttcaataactgccctcacatggctttggtccttggaagttcgccctaagtcctgaaaaaagagtttgttcacttccaagactgtttttagtgaataaagcctctctcagctgattccagctcaaaggtaacttgccaaggtccgacgactttgttgtctaatttataccatggagcttggcgtaagaccgtagcttacctctgatccaaatttattaatgatgtaacttcttgttttcattcatgaactgaaagagctctctactacacatgggatccctgttaacaggcaacactctcttcctgtcacagtatctactgtttactgaatttaccaaatgttgaatctctgacgaagtccaaccttagcatacaatgagctagcagtggacttcagtctcagcttgcgaggatttctatccgttctgttgtgtacatgactagcaaaatgatttaatgcacacaaacaaccagagattaggtcattcttaaaaattctgtttataaaaaatttggacctcataaagagggtgaaaggataataaaaacaagctgcagagcacatagactttttgttgggctagcacagctgatttgtattagctgaatgacctcctagcctttaagattgttaacttagaaaaatattcccttaaagctgcaatattccttttcaaaccaaaaaataagactccttccacttgaagtcttggacccttctgcattttctggtatatactcttgcacactgtaaagtagcaaaatcttatgtaatgttctttctgtgaatctaaactacaggcttttttttttaatagaaaaaaatctttttctaagcattacataactagatggcttgatttttttatgtaacttgcactagtttggagtagttatatgcacattttattatatagatttgaaatatattagtaaagttcagatttccatatgtttggtttgttttcattctagtacaaaaagcccttgaaagatttattagagaaatatattttaagcaaatacattctgtaagaaataatgctaactttaattttttaaatgatctgtttatttatcagtgcctttgaaggagaatacacacatcacaaagatcctggaatatataaatgtgttgtttgtggaactccattgtttaagtaagtatgttgaaaacctataggtatggctgtatcatagatggcagcaaactagttattgctttttcatcttagaatctttccattgctgaattttcttctgtttgtttttctatttccatttacccccaacaaaacaaaagtaattattgatttcatggtaaattaccagtgtgacagactggctgattttgcactacttggatctttaaaatacccaacattaacttgttcatgtcagtaaccatggtgcttagcagagctgtgaaagagattttggcaagcatagaaatgtttatgcatttactgattttttaaatcttcaaatgacagccttaaatatttattggaacataatgaaaagttcttcatgtatatacttcacattgaataaaatccaccaagtagattatacttttgcaatgaagggaaatacctgtattgaatgtaacatgggaacatacctttacataggtaagcaaattatgtaatatgaggttaacagtttttgcatagattcaaaatctttattttaaagatcccaacagtttaccataaaacaggcagcacactggactttctgactaaaatagttcattcagatagtgtattctggagattatggatgttattcaagaaagggaaatctttaccaaaaacttatttatctaggtggagaaaattctagaagccctatgcttcccatgggttgctgacttgggggaataaaaaggcagaaaccttaattgggagtaaatgtcattggctgggtgtggtggcccaggcctgcaatcacagcactttgggaggccaagacgggtgcatcacttgaggtcaggagttcgagattagcctggccaacatggtgaaaccccatctctactaaaaatacaaaaattagataggcatggtggtgtgcgcctgtagtcccagctactcgggaggctgaggcaggagaatcacttgaacccaggaggcggaggttgcagtcagccaagtgtgccactgcactcaagcctgggcgacagagtaagattccgtctcaaaaaaaaaaaaaaagtaaatgtcatttatttaaaatggaattacagagtttcttaggggaaataaataaacaaggatctgatacttgtagctaaaacacacttaatatctctccataaatgtttctcttttaaaaaaccagcatttactgattttccagaaataacaggaaacagtggtttccttgaaattaaaaaaatgtttcttacattgcacaaaccttattgaacattaccattggttgagaatctgttctgaattcttacgtattccttctgttaaaaaaccgacccttcaaattgtcacccatttcctctcagaaaacacactccgtatataatgtttcaacacctttagcttatgtcataatagttgatataacacttaagatagttgctgagccatgttaaacttgttaatatcccaaatggtaaaaattggccacatcccctttactttttgattcagattctccatccccttccctaccatgtgattcactaaagtatgggatctaaagaaaacttactgttttaaataagaaacagaaccactgtaaatgaagggtttaacccttgtgagatttttgagtcacaaatcctaaaagcaagacccttatccaaacatagatgctagtgggagtcaggtttcacatttgatgtgatattgcctctatttcatctacttctgtgcttacaaggagagcttttattttccacatttataaggaatgtgatttaatactttcattctacttttttcttcttttaattgtttgcttcttttttacttgctttcttgtctattttgggaaaaattccttgctgtatccttcactggagaatgtagtcgagtagctcattggtctagtgccaacttctgtatgtgtactttcctgaaactgatatgtctgagagtctgtggttggctgcgtcttcctcccatctcctctatcatgaccacccttctcccacctcacaaaagatgacatacctttcacccagcccaaatcttaccatgtattgccctggggtacaatctccagggcatcaaacaaaatgacagttcggcaactttaaagagactcgaaagcaaggttaaaaaagtgttggtaaaaaatagtgaaatcgtatttcaccttggcaaggctcctggcacagcacagtccacctccctgtctgcctgcttgtctgtctctccatctgctgactgtccattcattttctactagcctacttaagtgagaaggctgccatgagaacatgtattcatatctttattcaaatgaacaaaaacgaaataattggaagtctttttttcggacacagaatacatccgatttggttgattaatttgacagtgaggactggctttgtaaattatatggtggacttcatctgctcagtgatctaaatatgtatctctaaggttttgtcaaatctacattttacgtatgtgtaaagtacacaaaacaccagaaaattaatcttctgcaatttaaaaaatttctgataagacattttaacttaatttaaatatatgaggaagcatgtatcagtcagcacccagtcaggacacagaatacacagtattttgaacagtaaggtttacagaattatgaactgtaagagaggattgtggtaataagggattgggtagtaagaaatgaaaagaaattctaaagaatacaggaatagcagacataagaaacaatcatgactcctaggaactgagatagatagccctaggaatcctctgcacccctccgtacacacagggctgagggctagaccttgttggagagggcatggctgttgccactaaacagcagagaagttgttatggtgccatgatggtgcaacttgctggagctttcctgaaatctgaaatttgctggaaatttaccctctgggatgctggggaaagctgtttgcagggcatctcagtggaggcgctccactaccaaaccatgtgagcggagcgccaggggaagctgctagccgctgggtgctgctcatcgctgtgcacagaaagcagcacctggcactgaagaagccactcgtgtagctggaaagcagagtatgctacctaagctgggtgcagaaggagctgtgtgctctgcaggagttggttgctggaaaagctgcgtacacgggaggagatgggtgcaggagagtccagtcacataacaggagcctggcactagagaagctgcccacattgcaaaagcctggaagcagagaaactgcatgggctgtgggatctggatgtgaaatatgctgcaagcactagaggagcttgttaagcaagcatcctgaaaccagaaaggaaagggcttttgctcctggagtctgtctcctgtgccctcagctggcaaagttagacctcatgctggctgacaaagaaagaagtatttaaagggcccagccccattttagcagagcaggcaaagaagatggatttagaggcgagaggctctaactttatttgagcacaaagtctattttttaatatcaaaattcttttaggggttcaggagcaaaagtttcaaaaccactcactagtctagtaaattaatgtcactatcaggggccctgtaggtaattggttttatgctttgaacaaaagtgtaggaaacaattgaggtgtgtgtgtgtgtgtgtgtatgaaaagtgtgtggagtttccgtttgttagaaaggagtgagggtagaaaactagacagaacagattaactagaggaaccgtatgagaaatactagtgggagggaaatagataatacagaagaaataagaagagtgctgaatttcaagtatctaatcacaccggggcctgttgtggggtggggtgagtggggagggaaagcattaggagatatatttaatgtaaatgacaagttaatgggtgcagcacaccaacatggcacatgtatacatatgtaacaaacctgcacgttgtgcacatgtaccccagaacttaaagtataataaaaaaaagaaaagatcatttcccccactgctatttctgttattttattcacacttaaagtatatgtgtgtgtgcatgcatatacgagcataatcctcatcatttacttgactgctgtgtgtattttacttcctcacaaaaaaggctattcaattattctcatttcattttcaaacttgtactctaaatacatttcctctctgaacaatatactgctttcttactgcttaccaagtacaagaacctcattcacagccttcttataaacctaatgtataatttattccatggttcacattttcttcacatttacaaattttaccaagctagtttatttctcatatagtactactgactttcagttagtaaattaactgacagaagtaagaatgttttctcttctggttatttgaacttttaaaacttcataaagtgaatttattgcacatcagataaaccaaagaaaacactgggaaaataattcagaaagtatttttgaccatttatattttgctttggttgacactttcctaggtattgtggaataaataaaataaatttatgaaatatttttttcctcaacgtacttacttttttggcatagtaagaaaaacacaacaaaccattataaaatatgacaaaataatgctagtgtctctctgaatgtgcctgtttgaaatgcttttgtatgtaataggaaggaatatgactacatcaaactcaggcaagacttcttgggggagatgagaacacactttaccaggccaagagaggggttcagtttttcccaggtggaggatgcctagtagagaataccatatgagaagaggaatcagagatagaatcaaaagtggatttttcaaggatatggaacactagtccaataggagtgggaaggtgggttatgttgggagtaatgggaaatatggctggggagttacaggggaccaattaaggaagtccttggatgccagagaaggcatctaaattcctactagaaatcttttaagccttggaatcttttcctccataaagccctatctgatccttctagtgtgaacgtgaatgtccctcatctctgctccatagcactttgaatgcgcttccatcattgcaatttctactttgttttataattatctgtctatgtgcttgtctaccctcttggagtgaatttcacaatggcaaagccataccttagtcatatttatatttatagccccggcacataataatcaccaaatacgtagttgttgatcacatgcatatctgaactctgttagatagatagtgaggtaatagcgtgatgaaaatgagatgtaagccataacagtgcacaagatagattctgggattggaaaaagaaggaaatagggatgttaattaacagcctcagtgggaactcttttttttccttgttagcggataaacctcaacactatgcatgtgcaatcagcttctgataattttgtttgagaccttgaggaaccacataggacattttaatattttgtatacacttattcagcaggccttccactgaatagctcattttctataggttcactaatgataatgataataatgctaaaacaatagctaacacttactacagcacttaccatatgtcaggcatggttcttagtgcttcatatatgtgaactcatttaatcttcacagcaacacattttatagatgaggaaactgagagaggataagtaacttgtgaagatcacacagccagtatacaaatggatttagaatagtagcactcaaacatttaaaaaagaagaaagttaaagaattatagtagaatgaaattttaatattttattttagtcactctggttatttcacttagcatcgttggaacaaatggaacacacagaaacatgcatacacacacacacacatctctcaattgtttgaaaaatctgtttgtcacagtacttaagtacttaagttgaaagttgaaaagtgtctcaatgtgggaagggctagcccaaaagtaatgagatccatcatggcaggtcatcaagaaggactcagtttcaggcaggttattatctgtccttagggaagtcccttggaatcctgacaagaaaatggagccaatgttcaggaagtcatcaggccattcaacatctgggagctagggcagcagctggatttgtgggcaggattttagtaattgaaactgggaggtcattttattttcacttattgactccctgtcacattttctcaaatagctgcattccaaattttcactaatcttttctttaaaaaaatcctctctctacattttttgagaagattgatgccaactgacacgaactattgtaaatgtctatcttactactggaaatttttgtgtcccttcatctttatcaaacaatcagaacaggcactgactaacagcagctagtggcgcctgctgaatatcaggccagatgtgtgatctcagattcatcacctgtaaaatggggtaaataacaccaaacaggtgtaaaaactaaatgcagaaaaatgcctcgaatatgccaggtattcaacaaatgttaaatacaagtggcctgtccaagttttgggaacatatcatactatcacagcagcctaaaaaatccttacaatgtgagaaagtacaggctttattagacagggtctgtctgttaacagtggatattagtgtgatgagtcacagctccagctgtgttgctacatttcaaatggaactctgctgcaagactgttcacacatgctacatttcacatgagcctcctgtgcaattttattctaggctaccagaaaatttaagccatttttcagctctttaagaacataagccctttcactgagaaaattccagtccagtgccacacacagttcactcaactgtgctacttcatgcatgctattctgttcaccactaaaagagactttcaacatgaacttttccctctgtgatgcaattttgtgtgtgtgtgtggcgggggaggatgtaagagcacagtgagaagataagagttttcccgttttcctctctactcaaatcccgtctcctcaacccttttaaaactctccttacgatatttaacaaccatttcagtcactgtggaattctgttatggagagtaacatgaatttaacttaagctttcttttgtggaactctagctggaaattgctcataattccagaaaatgtttcttaacctctaacgaagtacatttaacttgaattttaaaagatttgaattgcctctcaccttattcaaaatcctttaacgaagaaagctttccagtataaagaaactgttctgaaataaactagagttctgagtggtggcttacttaaagttgtgttatagctgagtaagtaatatattattttgaagagaatataaaattgacttctctcagcccactgacccttcctgtcttgtccccatacaatgatttataggaaaagtatttgtaatacagacagttacttttctatcttcaactcaactgaaaactcagagaaaaactacagctggattggaagaaaaggacttgcttgagacagggagtaaaaacacagccaaagcatgactttagaagaaagaaaagaacataaaagcttggcataagaaaaggaaagaacaactccatttgagaaactagaaaactatcgcaaggcatgactcaaagtataacaatatacaaagataattataactgcatttttctttttaaaaagttatatacacacggaaaagaactgaagcaatagatacaaaaatacctaggtgtgtgaagttgtgtgtgtatgtgtattatttggggaaaggaaagtgaggaaagaacaatcttgccttgcctcgtattacctaaataacaatcttagttcttcagttaattttccaaatggattacatttttcacagtgaattagaatggatagttagaataaactgggaaacataatagggaaaacttttaactgtaattcatgtacatttatcttgtttgaataaacatgaatcagaaaattaatattattccagtttacaaactttgaaattacttaaaggcagtttataaaaaataatgtgcaagttttagcaagtacttcagaggtaattcacaaagctttttttgtaaatgaataattcttttattgaaaaatagttattaagaattgcacaaattttaatcagatagatatcttcagtgtgttttacacgtggataaagaacccatcacataacattgtcaaacaaagatacagaagccatccagctcaccagttggaaacatcgtgtcttaaaagttttagcagaggctgggcgcggtggctcacgcctgtaatctcagcactttgggcggctgaggcgggcggatcacgaggtcaagagatcaagaccatcctggccaacatggtgaaacctcatctctactaaaaatacaaaaaattagccgggcgcagtggcgggcgcctgtagtcccagctactcgggaggctgaggcaggagaatggcgtgaacccggaaggcggagcttgcagtgagcggagatcgcgccacagcactcccgcctgggcgacagaacgagactccgtctcaaaaaaaacaaaaaacaaaacaaaacaaaaaaaaaccaaaaatcagctgggcatggtgatgcatgcctgtagtctcagctacttgggaggctgaggcaggagaatcgcttgaacccgggagatagagatggcagcgagccgagatcacaccaccgtactccagcctggtgacagagtgagactacatcaaaaaaaaaaaaaaaaaaaaaaaaaaagtttcagcacaaatttgttgcataaccatagtcaagttattttaactttctatctcattttttttcagctgttaatagtgagaataacatcaactgtttctaattcataaccctaccgtatcgaaggaaaggatcacagaaacatgctagaaaagatataaagttggaagtataaagtaagatttgtgaaaactgccactttaaataaatgtacacagtaagccataaacagcatgcaaatctgaagttctcaaaactaagtcggtataactggcttttgatgtcaacattattgcatattttataatatattatttgacacagtgatccatctcatccaaaatatttctggtttctgttgaataatttaaaaatattttagtgtggattttaaattctccaaattatataacttacatgagtaactcagagttttaatacatttgtcatttgcaaatctctctccccaacaaaactatgaactttttgagataatagattatgatatagggcttttgtagcccccacctctactccattacacgggcattggattttgcaaatcctaggtacttgactatttgttaaataaatacagtttaatcctgataagaataacagcaataacctgcctgaaaatgattcaagttgacactaagatggcggaaatgtaaatagatacttggtactggattcccataattattaattccctgccatgttttctgaataatttttttttgtattttctgatttctgtggtgcaaatgcttctgctgtgggctatttcaagtacagatatgacatcactaaatgtcggtttgggaagggacgtttggtagcaccattacacagtattctgtaatacagatatgacagttgtaaataatgtagtcaaatgtagttaaataattgggaagtggtgaattttgaatatttattatctttgtttttaatatactactcctggaacttacttttggtagatgcttgttacaacaatagcattgcttgcaactgtaaagttgtacctgtctcacctaagggagtgatgacgacgtctatggctaggacctttaacaacaaaacagtaaatagagcaaaaagtcacaaaaaataggatcaaccacccaaagctacattagaagaaaaattcatagtcgagcctttttattatcaaatataagaacgattaaaaataatgaaactaaatcttcatctcaaagtgctagaaaaataacaacaaaatcaataaaagaaattgggataaaatgtccacgtttttcctccaggcatttgccaattctaggcatgagaagagaggtaaagattccaggctgggcgcggtggctcatgcctgtaattctagcactttggaaggctgaggtaggcagattgcctgagctcaggagttcgagaccagcctaggcaacatggtgaaaccctgtctctactaaaacacaaaagaaattagccaggtgtggcggcatgcaccagtagtcccagttacttgggaggctgaagcaggagaattgcttgaacccgggaggcggaggttgcagtgagccaagattgtgacactggattccagcctgggtgacagagcaagattctgtctcaaaaaaataaaaataaaaataaaaagattccagacattccagacagagacatactgctaagaggcagacatactaacagaaaggtgtttctcagcctcagctctatttacattttgggatggacaattctttgttgcggggagctgccctatacattgtaggatgtttagtagcatctctgaccttccactagatgccagtagcattgtccccacttcttctgcacttgtgacaaacaaaaattcctccagacattctcaaatattccctggggcaaaattgtctcttgttgagaacagctgatctagacaaccaacagaatggtaaatctagctctaaatcaacaaataataaatcaaacactgacttttagtattttctgatttctgtggtgcagatacttccactgtgggctatttcaagtacagatatgacatcactaaatgtggggttgggaagagatgtttggtaacaccattacacagtatttctgtaatacagatatgacagttgtaaataatgtagttaagtgtagttaaataattgggaagagatgaattttgaatatttattttctttgtttttaatataattcatttaattataaatttacgtaatttatttttaataatggctatgtttagcagctagctcaacaggttccttaaatgataacaatagattctcctaagcttcagcacaccactgtaatgggggcaaacaaaagatagaccaaacttaacaaaaactgcaatccagcctccagtcagctcagtccccaaattgattaaggtgatctttcacctcctttccccagtctagctggctatcagaggataggatgaaccctctctggaagaagattaaattatctggagtgcaatttttcatgcacaaagcctggcattcataaaaaattaccaggcataccaaagtacaggatcaagggaaataaattgacaaaacaaacaggtttatacacagcccagatatacagatatttaagttaggctttaaaataactgtgattaatatatccaagaaaatagatgacaagatggagaatttcaccagacagctggaatctattgtaaagagttaagtagttttagggctgaaaaatgcaataactgaaagtataaacacaacagatgaatttaacagcatattagacacacaagaaagtaggactggcagacagcaacagcaaaaaacaggttagtagaaaatatccagactgaagctaggagggcaagaaaaaattatagataagaaatatgtttcagttataacatgtatataattagagccacagaaagggagggaaaagaagatgggaaagcaatatttgaagagataattgccaagaattttctcaaactcacaaacttagaaaaaaacttcaagctacagattgagaaagtgcttgaaatctgaaacaggatgaataaccatatcttattatatcacactgctaaaaatcaaaggcaaggagaaaatcttaaaaacatccagataaattaacatgaaaaataaaaaatgtagaactgttaaataaattctagaggttgatctttgaaaagaccaataaagttgaccatttctgtcaagtgtagtcaagaaagaagggaggaaaagtataatgtttaaaacactagaaatgagaataagataaaaccacagagatggaaaaaactattttaacgtaagagaatactatgtataacccaattctaataaattaaaaatctcagtgaggtgggtaattttctaaaaataaaataatatacaaaatttgactcaggaagagttacaagacctgaatagaccagcaacctcagaagaaattgagttatcacaaaaataaattattcctatgctattataaactgtatcaattaaagaaaatagaataaatcttatcaacttattgacaaatgtaaagtactcctaaaatcaagatctgataaaaagatattcaatcaaagaaaaactatagacctatctgatttatgaaaataaaatgcactcacattttattgcagcactgttcacaatagccaagatttgggagcaacctaagtgtccatcacagacgaatagataaagaaaatgtgatacatatacacaatggagtagtattcagccataaaaaatgagattcagttatttgcaacaacatggatggaactggagttcattatgtgaagtaaaataagccagacacagaaagacaaacatcacatgttctcacttttctgtgggtgctaaaaattaaaacagttgaactcatggagagagagagagagtagaaggatggttaccagaggctggaacagttggggggaagggaggatggttaacgggtacaaaaaatggttatgaagaacaaaaaattgaaaaactaaatgagacctagaatttgctagcacagcagggagactgtagtaaaaaaataattgtacattaaaaaaaaaaaactaaaagagtataattgggttgtttgaaacaaaggataaatgcttgcagtaatgaccccgatgtggtaattatgcattgcatgctggtatcaaaatatcttaggtaacccataagtatatacctactatatatccacaaaaattaaaaataaaaaagaaaatagatgtaagaatcttaactaaaatattagtaaaaggaatatagcaatatgttgaacaagtaacatgtcatgacaaggtaaggtttatttcagggatgtacaaatggttcaatactgggacatcttaggaaaaatataatcattttaatatgtactcagaagagattttatacacattcaaaatgtattctttaatttaaaaacctcttagtataaatgaatactatgtttcattaaatctaagaagtcatttgtaagggtatagaagaaaaaccaaagtgtttttttctgttgtctctcaccactcaacactactacaatacaagttctaggggaaaatagaagtgggaacttgtataacactggggtgatgtaggcctttctaaacaagattcccaaagcagaaataaaaagataaaagacattggattggactactaaatattttacttttctatagctcaaaaacaccatagagtatattattaaaaaaaaaaccaacagcagtggcaaaaaagcaaactgggaaaaatatatgcaatccatttgatggacaaaagattcatatcaaaatcaattgagaaagacaaacctcagaaaaatgggcagaaaatataaacagatacttttcagaataagaaatacatatgatccacaaacttaggaaaaaatctttcacctcttaataataaaaaatgaggtaaaaagatgaataattttttacctaccaaattagtgaagatttccaatattgtcaaattaagtattggtcagagtataggaaattagcactttcaaatactacagggtagagtgtgaattggtagtacctttctggatagcagtgtaataaattattaaaagtcttagaattctgcatgccataggtctagcaattacacttctaggaacttattccaaaaatcatttttatgcataaagatatagctacaagaatgttcttaatcattcttcttatgatacaagaaataatttcaatgtccaaaataggagtctatgtaaatgagctatatggtgaaaatatatctgacatttcagataatagtgcaaaagaacatttaattatctggaaagagatttaaaatacatttataagtctaaaagagtattaacatatgatcccatatctatgaaatatgcatacctataaatatatgcataggaaatagtttaaaaggttttgtaccaaatgttaacagtagttatctctggatggtgcaattataggtgatttttaaaatctgtacttttaagtttttctaaaattagcaagtatttatagggtatcagaaaaacactaattattttaatattacctttgctcaatgtgttacaaacactgaacaatttattttaaaaactgactttaaacacatcatctctctatgacaaaatttatcttttcccaataataatttgaaagaatgaattagaatgtagttccacatttatttttaaaggccaaaatccatattgcccatctactcacattcgtggtagatactttgcccactgccatctcttctaagttgttgctgcttctttccttttttatccctaagtgactggtaatggtgatgacttcctaatgaaaggtagccaccggaagcttaaactgcttaaaccttctggtttcaaattttctccctcctcatgactaccttccatcttcctgtagcacttacactgtcctattcccagaagcctagaggcaatcaatgaagggcgggacaccaaagttagatttgcatttattttcaaatggattgattttttttaactgtttatcatgtttgaatattttaaaattgggaatattttaaagccaccattggttgagaaattaccatgcattttgctaagcactttaaagaaaattgtctcctttattttttacaacttaaatagaaaatcaaagctcacaaagggtatgtaatatgctcaaggtaacacgggtagtaagagatggagctaggacatagattcatgtctgtctggcccctaaggcacccttccctagctcaatattatgttataatgcttccctgtattctggctgattcttctttttgctgagtaattcaccatctggtagctatcacactctggtgttaattggtgctaattttctgataatggccaatgactatacttggattttaaagtggaaaaagctatgattaaggtgtaatacatgtgaggtttaaagtcacaactttccccactttactgtgtgtgactttgaataagctacttaacctctatgagccttaatttcctcgtttgtaacatgaggataatacccttgtcacaagaacttttgagaggattaagtaaataatgttgaaatgttttgtaagtggaaaaaacactgtaaatgtgaagcattgatactgaacagtgtaaggattggtatacacagtagttttcagaacaaaggttcatcagtgaaagggaggcatgctgcttgttggaatagagactggagatctattaggtaagtactcctttaaaattctgggaaggtttgtttgtttactgcatcatattctgttattggtcatattctgggtcagttctggttattgccgattggtgttgatgataactggtaataatttgctgcaggggtgggtggggaaaagagcaattttgcttatttagagtaaaaagagatctagagaaactcaggagacaatggataattgatagttttaatagcttaccaaatggccagcctacatccagagcactgtgtggttcaatatgagaccctcactttaaaaggtttatagacataaagtggtatgtgtattattttttcccagaactgggtctttttctagattttcacctgtttggtgcttaggtcagtgcttcccaccaagacagctttgtaacagtgatgctttttcaatgtggaagtttatacggtgtgaagagacatttttttacttccccattgggcaaaaagctacattcagggaagagcagctgatggttaggagactcaaaaccatgtcactttgaaaagacaatggaagagaactgaaaaggcttagctcaaggggaaaagtcgtagagctgtcagggtctacttcagtaatttgcaaacctcactgtccattagaaccatacattccaagtctctcctcaaagttctgatgtagcaagattatagtggattctagaattttctttttaaaactctcccataattcttatgcttggttcccatgagtccaggcgaaggttaaggaagccctgccttagggtgatgtcagtagtcatgcaacaaacactacaaacaataggcatggagagctgaaaagatttatcaattgtctgaatgcgagattggtgaaaagctattcctaaagattaatttgatgtttaaaacctagtttggaaaggaagatgatgaattcagttttggaagcctgatagatttgagattttaacataaaatttcaggtatatcagtcttccccaaagtgtgttccactgaatatttgtttcatcagaccattacatctacataatgctagtcccaggacatgttgatattgtgttctgtgaaaaaaatgagtgtcattggactaggaaaataaaagatggctcattgggaaacaccgaattaaaataagtcaaatggttgctttatcataaaactcatggagcctacaacacactaatgttcattgtagagctccaggagtaatacatatgtagcactttcagaattttttcaccacagaaaatttttataattgacgaaatgttgtgaagctaatgttcctgataacacacgtaggaaatgctaaagtagataaggaagatcttttttttattattattatgctttaagttttagggtacgtatgcacaacgtgcaggtttgttacatatgtatacatgtgccatgttggtgtgctgcacccagtaactcatcatttaacattaggtatatctcctaatgctatccctccccactcaccccaccccacaacacgccacggtgtgtgatgttccccttcctgtgtccatgtgttctcattgttcaattcccacctatgagtgagaacatgtggtgtttggtttttttgtccttgtgatagtttgctgagaatgatggtttccagcttcatccacgtccctacaaaggacgtgaaatcatcattttttatggctgcatggtattccatggtgtatatatgtgccacatcttgttaatccagtctatcattgttggacatttgggttggttccaagtctttgctattgtgaatagtgccacagtaaacatatgtgtgcatgtgtctttatagcagcatgttttataatcctttgggtatatacccagtaatgggatggctgggtcaaatggtatttctagttctagatccctgaggaatcgccacactgacttccacaatggttgaactagtttacagtcccaccaacagtgtaaaagtgttcctatttctccacatcctctccggcacctgttgtttcctgactttttaatgattgccattctaactggtgtgagatggtatctcactgtggttttgatttgcatttctctgatggccagtgatggtgagcattttttcatgtgttttttggctacataaatgtctccttttgagaagtgtctgttcatatccttcacccactttttgatggggttgtttgtttttttcttgtaaatttgtttgagttcattgtagtttctggatattagccctttgtcagatgagtagattgcaaaaattttctcccattctgtaggttgactgttcactctgatggtagtttcttttgctgtgcagaagctctttagtttaattagatcccatttgtcaattttggcttttgttgccattgcttttggtgttttagacacgaagtccttgcccatgcctatgtcctgaatggtattgcctagattttcttctagggtttttatgattttaggtctaacatttaagtcttcaatccatcttgaattaatttttgtataaggtgtaaggaagggatccagtttcagctttctacatatggctagccagttttcccagcaccatttattaaatagggaatcctttccccatttcttgtttttgtcaggtttgtcaaagatcagatagctgtagatatgcagcattatttctgagggctctgttctgttccattggtctatatctctgttttggtaccagtgccatgctgttttgttactgtagccttgcagtatagtttgaagtcagatagcatgatgccttcagctttgttcttttggcttaggattgccttggcaatgtgggctctgttttggttccatatgaactttaaagtagttttttccaattctgtgaagaaagtcattggtagctttatggggctggcattgaatctataaattaccttgggcagtatgggcattttcacgatattgattcttcctacccatgagcatggaatgttcttccatttgtttgtatcctcttttatttcattgagcagtggtttgtagttctccttgaagagatccttcacgtcccttgtaagttggattcctaggtattttattctctttgaagcaattgtgaatgggagttcactcatgatttggctctctgtttgtctgttattggtgtattagaatgcttttgatttttgcacactgattttgtatcctgagactttgctgaagttgcctatcagcttaaggagattttgggcttagatgatggggttttctagatatacaatcatgtcatctgcaaacagggacaatttgacttcctcttttcctagctgaataccctctatttctttctcctgcctaattgccctggccagaacttccaacactatgttgaataggagtggtgagagagggcatccctgtcttgtgccagttttcaaagggaatgcttccagtttttgcccattcagtatgacattgcctgtgggtttgtcatagataactcttattatttgcagatatgtcccatcagtacctaatttattgagagtttttagcacgaaggttgttgaattttctcaaaggccttttctgcatctattgagataatcatgtggtttttgtcgttggttctgtttatatgctggattacgtttactgatttgcgtatgttgaaccagccttgtatctcagggatgaagcccacttgatcatggtggataagctttttgatgtgctgctggattcgatttgccagtattttactgaggatttttgcatcgatgttcattagggatattggtctaaaattctctttttttgttgtgtctctgccaggctttggtatcaggatgatgctggcctcataaaatgagttagggaggattccctctttttctgttgattggaatagtttcagaagaaatggtaccagctcctccttgtacctctggtagaattcgactgtgaatccctctggtcctggactttttttggttggtaagctattaattattgcctcaatttcagagcatgttattggtctatttggagattcaacttcttcctggtttagtcttgggagggtgtatgtgttgaggaatttatccatttcttctagattttgtagtttatttgcatagaggtgtttatagtattctctgatggtagtttgtatttctgtgggatcggtggtgacatcccctttatcatttttttattgcatctatttgattcttctctcttttcttctttattagtcttgctagcagtctatcaattttgttgatcttttcaaaaaaccagctcctggattcactgattttttgaagggttttttgtgtctctatttccttcagttctgctctgatcttagttatttcttgccttctgctagcttttgaatgtgtttgctcttgcttctctagttcttttaattgtgacgttagggtgtcaattttaaatccttcctgctttctcttgtgggcatttagtgctataaatttccccctacacacggctttcgatgtgtcccagagattctggtatgttgtgtctttgttctcattggtttcaaagaacatctttatttctgccttcatttcgttatgtacccagtagtcattcaggagcaggttgttcagtttccatgtggttgtgcggttttgagtgagtttcttttctttttttatatactttaagttttagggtacatgtgcacaatgtgcaggttagttacatatgtatacatgtgccatgctggtgcgctgcacccactaactcgtcatctagcattaggtatatctcccagtgctatccctcccccttctccccaccccaccacagtccccagagtgtgatattccccttcctgtgtccatgtgatctcattgttcaattcccacctatgagtgagaatatgcagtatttggttttttgttcttgcgatagtttactgagaatgatgatttccagtttcatccatgcccctacaaaggacatgaactcatcattttttatggctgcatagtattccatggtgtatatgtgccacattttcttaatccagtctatcattgttggacatttgggttggttccaagtctttgctattgtgaataatgccacaataaacatacgtgtgcatgtgtctttatagcagcaagatttatagtcctttgggtatatacccagtaatgggatggctgggtcaaatggtatttctagttctagatccctgaggaatcgccacactgacttccacaatggatgaactagtttacagtcccaccaacagtgtaaaagtgttcctatttctccacatcctctccggcacctgttgtttcctgactttttaatgattgccattctaactggtgtgagatggtatctcattgtggttttgatttgcatttctctgatggccagtgatggtgagcattttttcaagtgttttttggctgcataaatgtcttcttttgagaagtgtctgttcatgtccttcacccactttttgatggggttgtttgtttttttcttgtaaatttgtttgagttcattgtagattctggatattagccctttgtcagataagtaggttgcaaaaattttctcccgttttgtaggttgactgttcactctgatggtagtttcttttgctgtgcagaagctctttagtttaattagatcccatttgtcaattttgtcttttgttgccattgcttttggtgttttggacatgacgtccttgcccatgcctatgtcctgaatggtgatgcctaggttttcttctagggtttttatggttttaggtctaacatttaagtctttaatccatcttgaattgatttttgtataaggtgtaaggaagggatccagtttcagctatctacatatggctagccagttttcccagcaccatttattaaatagggaatcctttccccattgcttgtttttctcaggtttgtcaaagatcagatagttgtagatatgcggcgttatttctgagggctctgttctgttccattgatctatatctctgttttggtaccagtaccatgctgttttggttactgtagccttgcagtatagtttgaagtcaggtagtgtgatgcctccagctttgccaaaatgtaaagaccatcgagactaggaagaaactgcatcaactaacgagcaaaatcaccagctaacatcataatgacaggatcaaattcacacgtaacaatattaactttaaatgtaaatggactaaatgctccaatgaaaagacacagactggcaaattggataaagagtcaagacccatcagtgtgctgtattcaggaaacccatctcacgtgcagagacacacataggctcaaaattaaaggatggaggaagatctaccaagcaaatggaaaacaaaaaaaggcaggggttgcaatcctagtctctgataaaacagactttaaaccaacaaagatcaaaagagacaaagaaggccattacataatggtaaagggatcaattcaacaagaagagctaactatcctaaatatatatgcacccaatacaggagcacccagattcataaagcaagtcctgagtgacctacaaagagacttagactcccacacattaataatgggagactttaacaccccgctgtcaacattagacagatcaacgagacagaaagtcaacaaggatacccaggaattgaactcagctctgcaccaagcggacctaatagacatctacagaactctccaccccaaatcaacagaatatacatttttttcagcaccacaccacgcctattccaaaattgaccacatagttggaagtaaagctctcctcagcaaatgtaaaaggacagaaattataacaaactatctctcagaccacagtgcgatcaaactagagctcaggattaagaatctcactcaaaaccactcaactacatggaaactgaacaacctgctcctgaatgactactggatacataacgaaatgaaggcagaaataaagatgttctttgaaaccaacgagaacaaagacacaacataccagaatctctgggacacattcaaagaagtgtgtagagggaaatttatagcactaaatgcccacaagagaaagcaggaaagatccaaaattgacaccctaacatcacaattaaaagaactagaaaagcaagagcaaacacattcaaaagctagcagaaggcaagaaataactaaaatcagagcagaactgaaggaaatagagacacaaaaaacccttcaaaaaattaatgaatccaggagctggttttttgaagggatcaacaaaattgatagactgctagcaagactaataaagaaaaaaagagagaagaatcaaatagacacaataaaaaatgataaaggggatatcaccactgatcccacagaaatacaaactaccatcagagaatactacaaacacctctatgcaaataaactagaaaatctagaagaaatggataaattcctcgacacatacactctcccaagactaaaccaggaagaagttgaatctctgaatagaccaataataggagctgaaattgtggcaataatcgatagtttaccaaccaaaaagagtccaggaccacatggattcacagccgaattctatcagaggtacaaggaggaactggtaccattccttctgaaactattccaatctatagaaaaagagggaatcgtccctaactcattttatgaggccagcatcattctgataccaaagccggacagagacacaaccaaaaaagagaattttagaccaatatccttgatgaacattgatgcaaaaatcctcaataaaatactggcaaaacgaatccagcagcacatcaaaaagcttatccaccatgatcaagtgggcttcatccctgagatgcaaggctggttcaatatatgcaaatcaataaatgtaatccagcatataaacagagccaacgacaaaaaccacataattatctcaatagatgcagaaaaagcctttgacaaaattcaacaacccttcatgctaaaaactctcagtaaattaggtattgatgggacgtatttcaaaataataagagctatctatgagaaacccacagccaatatcatactgaatgggcaaaaactggaagcattccctttgaaaactggcacaagacagggatgccctctctcaccactcctattcaacatagtgttggaagttctggccagggcaattaggcaggagaaggaaataaagggtattcaattaggaaaagaagaagtcaaattgtccctgtttgcagacgacatgattgtatatctagaaaaccccattgtctcagcccaaaatctccttaagctgataggcaacttcagcaaagtctcaggatacaaaatcaatgtacaaaaatcacaagcattcttatacaccaataacagacaaacagagagccaaattatgagtgaactcccattcacaattgcttcaaagagaataaaatacctaggaatccaacttacaagggatgtgaaggacctcttcaaggagaactacaaaccactgctcaatgaaataaaagaggatacaaacaaatggaagaacattccatgctcatggataggaagaatcaatatcgtgaaaatggccatactgcccaaggtaatttacagattcaatgccatccccataaagctaccaatgactttcttcacagaattggaaaaaactactttaaagttcatatggaaccaaaaaaaaagcccgcatcgccaaggcaatcctaagccaaaagaacaaagctttagtgattttcttaatcctgagttctagtttgatcgcactgtgttctgagagacagtttgttataatttctattcttttacatttggtgaggagtgctttgcttccaactatgtggtcagttttggaataggcgtggtgtggtgctgaaaggaatgtatattctgttgatttggggtggaaagttctgcagatgtccattaggtccacctgttgcagagctgagttcagttcctggatatccttgttaactttctatctcgttgatctgtctaatgttgacagtggggtgttaaagtctcccattattattgtgtgggagtctaagtctctttgtaggtctctaaagacttgctttatgaatctgggtgctcctgtattgggtgcatatatatttaggatagttagctcttcttgttgaattgatccctttaccattatgtaatggccttctttgtcccttttgatatttgttggtttaaagtctgttttatcagagactaggattgcaacccctgcctttttttgttttccatttgcttggtagatcttcctccatccctttattttgagcctatgtgtgtctctgcatgtgagatgggtttcctgaatacagcaccctgatgggtcttgactctttatccaatttgccagtctgtgtcttttcattggagcatttagcccatttacatttaaagttaatgttattatgtgtgaatttgatcctgtcattatgatgttagctggtgattttgctcgttagttgatgcagtttcttcttagcctcgatggtcttcacaatttggcatgtttttgcagcggctggtactggttgttccttttcatgtttagtgcttccttcaggagctcttttagggcaggcctggtggtgacaaaatctctcagcatttgcttgtctgtaaaggattttatttctccttcacttatgaagcttagtttggctggatatgaaattctgggttgaaaattcttttctttaggaatgttgaatattggcccccactctcttctggcttgtagagtttctgccgagagatcagctgttagtctgatgggcttccctttgtgggtaacccgacctttctctctggctgcccttgacattttttccttcatttcaactttggtgaatctgacaattatgtgtcttggagttgctcttctcgaagagtatctttgtggcattctctgtatttcctgaatctgaatgttggcgtgccctgctagattggggaagttctcctggataatatcctgcagagtgttttccaacttggttccattcttcccgtcactttcaggtacaccaatcagacgtagatttggtcttttcacagtcccttatttcttggaggctttgttcgtttctttttattcttttttctctaaacttctcttcttgcttcatttcattcatttgatcttccatcactgataaccctttcttccagttgatcgaatcggctactgaggcttgtgcattcgtcacgtagttctcttgccatggttttcagctccatcaggtcctttaaggacttctcggcattggttattctatttagccattcgtttaatttttttttaagaaagatctttaagtttactacaaaggccaaaggtagatgtataggtttcatggaaggaatgaataaggcagtgaaatgctgcagagactcacaagaataagaaccagtcatttgagttggcaatattagaaaatttagaaaaggcaattttagtggaagtagtagtgaaagtaagattttgaagatgttaggatacaatctcatgttttcaaaccacaagctgaaatggagacaatgtgttaaaatatttaaaattggaattatcccagaaaacgtagtcattatagttatgctactatagttaaagtaggagtggtaaagctaactccttataataggaggggaagtagattcatggaaagattttaattttttggataaactgaaaaaaggtgtaaagagagatgcatataaggtgctagaaatgagggaaagaggttaaagaacatgtaggataaactttagaaaaggagattaatttttctccttctgggggataggaaattttttagatgaataattgtgttagatttttttagattaataattgtcaatctatgagattagttttcagtattccgttttttggattagctagtttcttagcttgtgtattagtgtcaagtatgcttgcctagagtaggagttcaatacatggctgttctcattagtggtgctgttattttctctatttgaacatgttactgcttcttaccaccaccagtgagtagacaaaagagagtccattaaggtcaaaccagataactaactctatttggtttatcagtactgcatttcataatcataagttggctggccatgattccttctgctgtttatatttcatcttcattatcttgcattgtacttgaaacaacctatacttttgttcattcatgtcttgatttgtttttcagtggtcattctagttgcaattttttttattctaaggaaacttgctttatgccgctggagatttgcacattttacttctatgtactcacttaagtacatagtgttaatggcagtcgcatgactcatagtctgcataagcataaattaactccagtacctctgtagtatgcccctttgagattgctctggaagaccacccagaagtctgaatttacacagactgcaaagacccattgaacttaagaaaacccagcagcactgactgaccaaatatacctgcatctttcagtatgaacgagctatccatttgctcttgattgaggttcaaactgtggatcttaaactataaagggctttatgggctgaattatggatactttaagcaagacctcttccttcaaatagagtgctttgcacatagtgagcactccataaatgctcttgactgactatgacttaatgaatgtttagaccttccagtgaacttcttttcatgctttccagatttgaaggaagggttcttgatattgaatatttgtctttcttattagttttgcttgggggcttactatagtgtaattttactgaccacagaaaatttatctttttagtgatgaattattttaggtggtctgttggccctgcctgagtaatcaatggaatctaaggttttataatttgattcatgtgttcagagataatagctgaaaaataaaataatagttttaataagttcaccaagaaagtagcaaatgtattattttttgcctcggggctgggtctttttctgatggatttttcacttgtttggttcttagttcattgcttctcacaaagacaactttataacagtgctgcttaaaaacttttcaatgtgaaagtttatacaatgtgaggggacttttttaaaaaaaatttattcccataggttattgaggaactggtggtatttggttacatgagtaagttctttagtggtgatttgtgggattttggtgaggggacatattttacttcctcattaggcaaaaagttactttggaaattactaatataaacaaattggagtaattagaaagatagaatgttctattttaaataggtgagattttcttagctttaaaagaacattcaggttagtggttctcaggattagctagagaacttaaaagtatagatttccaaattcttcaattgtgcttttcaaaaggttaatgtaattcagataataatacatgttcttgaattattgatttgggcccagggaacaagtggtttagtacagattttctgtccccaagttaagtcaagaaacattttatactatctcttttcaaggcagttatatactattctattataaagtaggcttttagtatccttatgatttttttaaaaacaagaaaattatatgaatctaatatcctgtgtcggaccatgcagcttgaagttttcttattgatcctagtagctcacgagaataaaccaggaataaggaacaaattgaagtggcaaatgactccaaaggaacaaaacttactcttccttcatttcttccccatatactaaatgaaggtactactcattatccacccagttaccggagcaaaaagcctagcagtcatctttaattattctttccctcacctcccatatctagtctaccaatgcattttgctccacctccacgcaccttcaaaatatatcctgagtctgactcctcttcatatccattgctcctgctctagtctaagccaccatcatctttatccgctttgacctgaactattataagcctgtcttctttggctttttaaaaaatcgacttcattttttagaacagttttctatttacagaaaaattgagatagttcagagagttcacatataccctctcacccagtttctcctattaacatcttacattagtgtggaatatttgttataattataaatgaatattggtacgtaattattaactaaagcccatttttttcatactttcttagtttttacctaatgtcctttttctgttccaggattctatccaggataccacacatttagtccttctgtctccttagtcttctcttggctgtgacagtttctcagacttttcttatttttgatgaccttggcaggtttgaggagtcatgatcaggcattttgcaggatgctcctctgccggaatttgtctggtatttttctcataactagattggggttatggtttttttggaggaagatcacagaggttaagtaccattttcatcacatcatattaaaggtatatgcgaacaacacgtcatcacttttgatattgaccttgaccacatggctgaggtagtgtttgttaggtttcttcactgtaaacatacttttttcccctccttttcctagtgtattcttaggaagaaagtcactacacacagcctacacttaaaaaagagtagggatttatgttccccatccttgaaggcagagtatctctacataaattatttggaattcctctacaagcgagagaagtctctttttctcttttatttttatttattatcattatttttcattttttagaggcagggtattactctgtcactcagactagagtacaatggcatgatcatagctcactgcagcctcaaactcatgggctatagtgatccttccacctcaaccccccgagtacctggaactacaagtgtgcagcaccatgcccagctaattttttatttttttttatagagaagggggtctcgctatgttgcccaggctggtcttgaactcctgggctcaagtcttttctttatttaatcaatcacttatttatatcagtatagactcatggatattaattttatactttgaattataatcaatactactttatttatttttgttgctcatattgttccaggtttggccattgagagctttttcagttggctcctttgtccctttgatgtattcccatcaatgtggggtgtattttttttgttgtgtttttgagtgcctcttactttttggcacttcttgatgatccaggtttatcttgtatatttcctgccctagtcctagaatcagccatttcttcaaggagtcctggttttctttattagagagtagtgttggaaaccaaaatctgaatggtaggtggcctctctgctttgactttttcccctgtagttcattctccacataacagggtgaagatttaagtacatttaaattatattgcaacctgtgatgggttatccttatatctttcaaaatcacaactccttacaatggtgtttaaagttgtggtctacccttacctgcttctatgattttatctcttagcattctctgtctcattcattccttcctggatgcattggcctcccgtcaccctgccttttttctttcttcttccccctcccctcttcctaattttaacccccaaattattaactaatgatttttaatgtagtattgtctaaatagtattaccttccttactaaaaggaataatgtaatgatcaattttataacttatagttaccattatatataataagttatataacaatggtgcgtttaggccctaatgagctacataggactctctttgccttctaaataattctagagagttctgtaaagtgaaaagcatgctcctcctttatcttctcatccacatttatgtcctcagaggctattgaagtgtccaaagtgctagtcaactctgtattgctcttgtctgagatttttacagctttaaacttttagagtctgtcagtaattgtgtctagaactagcccgctagccataacttctattattctattcctgattacaacctaaggcagaaatgaaaatttccagggaatataagaaaataaatattatgtataaaactggtagagtaaattttactaacccctaatctgcttcatcccccagagaacacatggcaagtgtgtacacaacaccaatcttgaaagacaagaccaagaaacaaatgcataagcaaataaatgcattggaaattgtcacaaagtgatatgaagagacaaagatcccattgattagaatcttctggtatgctactggtggtctccagtaatttgcagaagcagctgcccaatggccaaaattcaggttaagcactttggcagaatatgtttgaaaatagtgatgaggagtagggaagtaaaacacattttgtaaaatgagttaaagtgtggaagaactgtatacgttttgtttgatttggctaacttctaggtttttggcttttattggaggtttggggttgctaagtggctgactgtagaagaagtgaaatgtatgagtttgccaggactgccataacaaagtatcacacactgggagacttgacagaattttattgtctcacagttttggagggttgaagtccaagatcaagatgtcaccaggtctgatgtcttctgaggtctctcgttggcttgtagatggttatcttctccctgtgtcttcccctggccttgtctctgtgtgtgtctgtcttaatttcctctttttataaggtcactagtcacattggattagggtccccctggatgacattttaacttgattaactctttaaaaatgttttttccaaatacagtcacattctgagatattaggggttaaaatatcaacatacgaattttgggggaacataattcatccaataacatgaaggtatactctgttctctttagtgttattttcttagcattgtgaatttattctcagtagataaaaggccttgactttaaaaagcctcattctctgtggagatataaatatacacaagaaacaattacattattttagaggaaacataaatcacatagacaggaattcagagaaggtgaatatcaacaaggcctagggaagaattgtagaagctgggagccaaaaatggccttacaaattatttattttttcagcattctctatctgtaggtttgagttctacagatgcaccttttcgtcccctcacacttactttttcctctgttcccttctctctgttttcctctttctttattcctgggaatgcagggaaaaaaagtaggtaatttacctttttaatgggatagcttgtgtggggcaacattgcctcacttcagtaacttaatttcactaatgagaagaatggggttcacaagttaaatgatttgtccaggtttctgacctagaatccaggtcttctgattcttactgcactatgcactcaagtgcattgtgccactattttagtgggagaatgttttatttgtgttttaagaacaaataagattgcttttccatattgcataattaggtcatttgtgttattttccattagccttccctcttaaacatttccaatttcttcagctatttttattactattctcttatttttttcctacataattttggcatccatattaaagtttcgcctcacataagatcttaaccaaagtaataattctttcttttataatatagtgctatttttttttaaacttagctttactagtacttgtaccacaagtatgatattactaattgtacttgtggccataggtaaacttcacttagcatcattgtttcgatgaaagctaccttttactcaacttctaatatgtgtcaggaccacctaggtactttatggtatcgtctcatttaatccacacaaacgtttttaaaggtgaatatgttacctgttttatagatggtaagactcaaaatggtcattgacttctctaaagttgcatagggtggaaagtgggagagctgggacttagcttgttctgtttgtctctgttggctcctttcccacaactgttacgtgaatatggacaagaaatagacctatttgcttacgatgtgtacctctgatgcctacacagagcctgcttcctcagaggtcaatttgtggaaaaatgaatgtggcccacagcttctaaatatatttttatataccttttgctcttttagtttctttgagtcatttttatgtctcaatttgttctcccagatattaatgttttgtaatgaatttagacttcttcttggaacatgatttattccttcttgatattggcaaatcttaagactttggcgtgatttaatttagtgatatatcttaaccaaacaaccataaatctcattttcacattaaagttaaaagacgtataatactatattttgttaaaccacatgatttgtcataatagttgtaattgtatcatgttttcaaagtggcttgactgaattcttgctgttcttttgctcatgattatcctgatttctaaatttctgggttttaaaattctatttttttcagttttttaaaaaattaaccgtaaaattaatgggcaccttttatttaaatcattattatcgaaatgtaacatagaggcctaagttttaaacacagtgaatagctaactcataacctactgctgcttagttaatatgttgggttaaaaggatagaaatacccaagtaaaagtggactggcaatgccagaccctactatctaattcagtgaggactctagagaaaggcaggtttggaatagaaatgatatcagagttgtgggctgggatttctgtgattctcttggtgtccctctcagggctgcaagattgctatagcagttctaagtggcatatccttatgtggtattttcaaaggcaggaaagagggaaagatagaaaaagggccttctccctaaatcatctctctcattttcatgcagaaaaatcctttctgagaagcatcaccagcagactttacctttcctctcactgctcaggactggattaagtgcttctccttgtaccagtcactgacaacaaatagggttgccatgattggcttagtccaatcgtgattcatccctggggagtgcacattttttagcactcttcaaaatgggaattctgtttttaagacaggctattaggtaggcaattaatagtgtctgccactattactgaactcctttagtatgatcaaatagctattatgcacaaatgtacaattacaactctgatgagtgcaaaggaatgactggtgctatgaaatgaaagggatttaatcgagcctgcccactcttcttcaaataattgataattaggctaagatgtggagaaagtttcagaagttaggtaggcaaaggggttaaggtatagtagagtgggggagggaggaggaagcattccacgcagaggaagcatattgtgttcatgtaaattgaaagggcacataaatattcactgctgttctcactagtcactggtcggtgaaggcctttgagttacttctaggggtagaagaaattggtagaccttgtaggtctacaagtaggatgctgaaatactggaatttctgaaaaatttccatgtgttgaagggacaacagagcagattatttgacttggattgttttacaaaattcttgctgtagagttgccatatataatgcgcttacagacaaaaatcaggctgtcacccctgctccttctaacagttgcctgcagctagaatctttagttgatatcagttaaaaacattaagaacagcaccctcacttctctgacaccttctgcaatgctaatttctgtacttgatacttacatgattcccattttaaaatttttgatacagttgaacattaaatgaaaaacaatgttctctgagattttgtgggtttccccagagagacaataaaataaaatatcttttggcttcaatacacatagaatttttgtggacactgggctattctctgcaaggataaaatggtagttttataaatttgtccaggagtatacagctgtaaccaatgactaaaagtgacctcttttgaaaatttgcaactctattatcaaaagaatgcatatattacataatttaattatttaaaaagcattcatgatactcgaattctcctagtgtctaccctttctggcttacaattcatgaaaatttcattttcatgtttaaaaatttggaagtttttatttaaatcttgtaaaatgtggcaatattgctatggtggataggatacaggctcaactgttctgacaagactccaaaataatagtggcttaaaaaaaaataacagcttggggccgggcgtggtggctcacacctgtaatcctagcactttgggaggatgagacaggcggatcacttgaggtcaggagttcaagaccagcctggccaacatggtgaaaccccgtctctactaaaaatagaaaaattagctgggtgtgatggcacatgtctgtaatcccagctacttgggaggctgaggcaggagaattgcttgaacccgggaggtggaggttgcattgagctcataacatgttcctgggcaacagagtgagattctgtcttaaaaacacacaaacaaacaaacacaaaaaacaaaataacagttggagattcatatggcagttgcataggtgccttctatcttattgatttactattctaatatcagtttttccctcatgatctaggaatggctacttcagctcctggaattacattcacattccagccagtggcaagaaacagaaagaagggaagggtacattccttccctataagggaataactcagatgttatcacctcacttttgcttgtatccttttggcaagaacttagtcatatgggtacaactagcaacaaggcagttgggaaataatgtggaaatatgtctgtgtgcccacttaaaactcagagattttctaaaattaaaagggggaggatgaatattggaaggcagtaacattctgtgctataatcaccatcttttggcagttgccaaaagaaacggttgaatagttttgaacttagatgtgagtatataatttggggtaaaatgggtgtctgtggagacacaattatatttatgcatgttataccctattttatgcaattttgtatccctaccatctagcatagtatactactaaaaataaacacgtaaaaatatgtttggaatgaatgaccatccttcttttcttttcttgtgcaatccttattagatatgtatctttctttttacatttgccgtatattcatccttatccatatttcacttcccttctcaaaggggatttaagagtcgaggtgatcatagttcatagtatgttagaggagtactttgtatctctgtgtgtttaagtctgtatgtaaaatctaataggaatctgaattaacttaaaacaacaaaggaccagttttccctatccccaaattgacagttttaacttctattatcatgttttaattatcaatagagtagctgtattcttttgagtgttcagtactgtatctgagaattctgcagatttttttaaattgatacccaaggccattaattggtttgtgaagatgttttctctgcaccttacgtgtatattttatgtattgatcagctatccctggagaagataagataatctgaggaataaaagtgttctgacatgatttttttttttgtatctcagaattaggtattctatagacattttgatcatttatcttgtttttggccttctgttaatatacagattcatttgttcgtgtgttaatttatactacacctttttaataattcttaagtctcaggtgctgcattcagtgttgggagcatgaggatgcatgagacccagtgtgcacctcactcagcttcgtgtcaatgccacaccatgtggggagtgttgtgccaggcccccactgtggggtaactgagggggaagaaaggagcttgtgaggcaatgggggcaggcgggatgctgacatgattcacgtgagccttgattgttgagaaataatatggcaatagttccatttgatgggagtgatacatgcaaagtgtgagttagagatggattggagagctggatcatggaggaccctttatacgccatgcagaggagtgggcacttaatgtcgccaggtcagtggctttcaaacctttttgtccacaacccatagtaatgcatatgtttttacatggtgacttattactaggcctggacctaacatttgcagggcctgggcaagaggacaaatggtagcatagatacatactgtatagctaaatagttaaaactcaaggcaaaaaactgttagaaaaggatataccaacctatcttgacacatacaccttataatgaaaaatgataccaaatgactgagagtaatgcaaatttaaaattaattttgtcttccaccaaaagactatgaatttaccctgaggaaatgccaggacagtggtaactgggccaagctgggggagaggagggaaaggctcactcagccttctcttccaatggccatggaatctgtagataaatacctcctttctcttgctcttttttgggggaggggtgctttcatttctgccagaggctctgggcccccacccattgctccttctatacccaacagccaggcatcgagttccaaagtgatctagtccatgacaatccagtccaagggcaacctctggcccccaggtgctctcagccactcaccctcacaggagggtttgcattaagagttctctgagcaggaatgtgaagaagtattgagacagggggcccctgctttctatgccacacctttttcccatcttttagggccaaggggtccctccagccctcaggtccaggctctttcattcagctgacaacttttggccactccttggactggaggtacacacatgctagtagtactacctgacctgaagaaggggcccatgtaggtcagagtagcaacttaaggccatttgggtagagaatgatggtgatgctggtagtcagagattcaggtggaaaagagaacttcctggctggtggaaaacagcacaggcagaggaaggccagagcaaaagcttcttgctcatcattggtggatctaaagggaaggagaacattggttatgaggttattcagccaaggaaaggcctaaagatggtgaaagtgaagatagagaggaggggagggatgtagaatccgcagatcttgatgactaattagatattgggggtgcagaagaaatctagaataatgccatcatttttgatgagtgccatttaaggccacagtgtgacattcaggtagtattttgtttattatttggaaatatgggtcaagatatggtcaaagaagtgttttcatttggatagtttgttaagatgggaatttctaggccccacttactgaatcagaatcaccaggagaagtcctgggagtctgcaggtgagcaaactcctgcggtgattttgagacacatgggtaccctagagagtgggaacagtgtttcaggtggcctgagggctgaactctggtgctcaccaatacttaagggacaggaggaggaggggaagtgacagacagacactggaaagaagtgggcagtatgtccaatgaaagagagaggtttagtaaagtatggacagtgacacggcttgtgcatttaacattgggaagcttctgataaaccttagcaaaggcagattgcactgattcaaggaccgaatatgttgggagattaggaaagggagatagatgatataggatatagtctatacatcttttttacattataatttgattgtaaagccagatgaaagagggataacaaagcaaggcacagatttgaaggaggcctttaaaaacaattctggagcacttatatgatgaagggaagaggaacctgtggagaaccagatactgaatatatggcagagaaaaggagtaattgatatagccttgtttcaaaggagatgagagatgcattttaggacccaggaggagggaagcttaagcagaaggaagaacacctctggcttctatacagttaagaaggagaaagggcatgcatagatgcaaaaaattctcttaacagacatttgaacacaaactctagtcacaatttaggtgttgtggctacagaggttaataaggcatggctatagttgagtgggggagatagataaggaaaccagcaagataacatgtggcaagtgttgttagagttgtgctaagagatggtggaaacacaggggagggcatgagacaaggctttgcagaattggagagagggcaaaatgtgaaaatgggtttgtacctgaaatagaaggcagggacatggaagacaaaggttgagatgaggactatggtagggccaggacttagggaaaatgtgcaccaggattacggcagtggtgattggtaaccatggatgcaattttacgtgtacatgtatatgtgtgtattacatattacacatatatgtgtatatattttacatatacatatacacacacacacatacacacaatcatacaattataagcatcagctgaaactttgtttgggaggacttcagaaaatgaatgtttatgaccaaggaagcttcttgcttatccttccctttcctcctttgatgacttttcttgaggctaatttaggtacagaaagccaccgcttccaaaagtgctttggaaccctggcataatttcaaagaaatctcctttcccacttagttaactacatttctccaggaaaaaaaagtcttgtctgtcaatgtaacatccttttaacaggactcccgctggttggttcttgtatcttgctgtggcagctgtgaacatatatactattgattgttgatgtgtgatataaatccgactggagcatgcccactaattggtttgagagctagatatagacaatgctgttttatagtagcttgtgtagataggcctagtcatagggttaattctgcttgacagcacatcagcagcatcttgagagtaattacctaacagaagttttcccacagccgaactgagagcttcaaaggcttctgaatttacaaccagtattaaccaatatctgaaacataatgttcccacaagagctcagaattttttctccttcttattaaatgtatggggttactaggttcatttgctgtgtgctaagaacttagtgaaaagttacttcgtgttgaataatttcaaaccttgaataataaagagaataattatgaatttggttttgtattgctttattatcttactgaaacaagttaatctgtaaagatcaggtgccttttaaaaaaccgtattgtatcctgtttcacccaaaaacaaatttaaaaagttaatgtcttttccatattgtgctatctgtattgatatttgcatatttagagggcctagggtaatgcatgcatataaaatgattacaatacatatatattaacattttagaaatatacactgaaaaatgtaactattacctcccctcccaaccacaccccccccccccatgaaataattgttcttttacaaacagtttttatattgtaaaaactttctttctctttgcaggtcagaaaccaaatttgactccggttcaggtatgtttacattaataatgctcttctgaatatattttatttacattattctctgaggagtaaatcatcagatcaagaaccattttgattttaaacagactaggcggtttctttccaaaatgtgagtcccacctcaaagcagggctattgactgcatcaaatcataatttgaggtgttcactttggagtcttcatagctctgcaataagcattacatgacctatatctgcagagtttcattttaaaagcagaagtgggggttatacatactaattgctcaaagtagattattattttctcagtggacaaagcatcctgagtgatttgaaaattctctttaggttgtcaccaaatgtgggagatggatgcatttaattcagcaaactatagagagttcaagccaatagaaatagaaatttgtctatggtttattagcttgttttctcttaaaaaagttttattgctagatgggtgatagaaaatgaaggtcaccttaagccattattttgaatctattaagacaaaatttacattctcacaagcagtggcatatcagcctctttagacattttcttttcattaagcatgaaatgtagctatataattctcaggtttgactatgtcattatgtcacttgctgagatttatgtgcttcaaagtttctgatggcatttacaattaaagcacaaaaattgcctcatatttcatacaaaggaattacgtatgccctttggtagactgttaacagataaataaacattaatttttgaattccaggagaaaataatttacagaaaaatatataacttgttgaatttacaagtaacatttttactctggttcaagtttcactatatggtaactttaaaaatgtttttacttattatattcacaaaggaacaagtgctatatattccttttgatagtagtgttaaggagacaacacactttttcttctttataagccttttctttcttttattgtatggttttgtgaatttggtgagactcattaactatgaagtctatacatttgagttaacaaatttacctagtttggtaactccagaaatctttggatcctgtgtcttctgcagcctctgaatcagatgtatgaatggtagtataagataaacatttttggttgaaaacgctgactatatagagactaaaggtgggatggcattgtgtcaactgtttgactccttgattcacaaatggctcaaaataagacgaaaaatctttttcattttttaagttaaaatctttaagtataatttaaaaataaatgaataaagttgatggagagtgtaattttacctaaaaattacatgtctcttttttccctgccagtcaccaaatattaattaagaacccacttcattatgatctgatgtaattccctaaacatcaagtcagaaactggttttagggtacagggtctggaatatagcttttaaaaatgaatacgtccactaggttcatcttgaaggtagaattgaaggtagaacctggaagtagtttacaaaactgaaatattaggcagctattgtcaaagtcagacaatttatgttaacttttcaaatccaaattaaagtgtgctgctaaattcctgtactgaaggtaagtatttatcatgaaaatagttataacagctgtacaggcacacatctttcactcttgtgaccaaagattttatgcatgacttattttttttcaagttcttatttaaaaaaaatctatcatggacaacatctgcatgtctttgaaaactacaaagttctgtactctgaaaagtcttaaaggggaatactgattaaaagtttatttgttcttttaatattaaacttaaatatgttgtggaaagaattcagatgttttcaaattaagaaacggaattattttttcttataagctccttttagcttatgactgaaagaatcatgacaaaggaagctagaaatgtattctttggcatcctatatcatgaaaattttggttagaaataaggtagcatagggccgggcacagtggcccatgcctgtaatcccagcactttgggaggcagaggcaggcagatcgcaaggtcaggagatcgagaccatcctggctaacatggtgaaaccccatctctactaaaaatacaaaataattagctgggcgtggtggcacatgcctgtagtcccaactactcaggaggctgaggcaggagaatcacttgaatccaggaggcagaggttgcagtgagccgaaattctgccactgcactccagcctgggcgacaagagcgagactccatctcaaaaaaaaaaaaaaaaaaaaggaaataaggtagcatattggaacaattaaataggttcagattctctattgtgcatcaaatacagaaagtaaactaggtctgtctaatgttgtatacagctctgacaaagcaagatttttaaatgaaggaatatgccaatcttactaggaaaaacaaaaccataaaaaataaatactatggtcagtgaccagccataacggaaaggatttcaaagttaaattttatgtgtgtgtgtgtgtgtgtgtgtgtactcacacacccacacccccaccacacacacacaaagtatatcaaggaaagtacccaactttatgcagagcttaccgcacaacatttttagtttaggtaaatgagttttagcctgtggagtgagattcatgagaaaggaaggaaagttttcattgccagcacatggtaaaaagtttcatttgttgaatgtataccaaatgattatcctagaaattgatttaaattttttctgatcagaattgcatctttctttttttttacaaaagcaaatcctcaacctcctgtgctttttaaattaacaattttttataatcaaaaaatttcaaccatgtataaaagtagaaagtatagtgtgattagcacccatatagtcatcctctaaatgttacttttgttaattatttgccgaatttgttttacctttttttgcttgaaatattttaaagcaaaatacatacatttcatgtgatttttacaatccagaaattatagatggtcttgacttattaaaaggcgttaaagttttgaggttttcatctattttagaaatttgagtgacatacacgtcattgtgtaaaggatcgtggcattttcatgtccacatccagttgaaaactctttgaaagtcctatttgtggtgaattgtataattaagaaaaccttcaaccagaaggcagaggccctgaattaattctgacctgagaactccagaaattttctattctcaaaattagttaaaatgtcagctgccatttagctgtggtctctgtgtactgagtaatatactgactaaaaaccttttctgttgatttataactcaatcacctaaagtttttggctttgccaattgagaacagtcagcttaccttctttttaaaaggagttttaaggtttccattttataccttttcctagttgatgtactaatgttggcttgcctaggattgtgtggagttggtgattttactaatagagtaaaacagacttccttttatgttcagaagtagcaagaagctatactcttctccccacctcccaagaagggaagttagttgatgctggaggaagcagagcattgagtttaatgtagtgattaaacatgaaagccatatatcaaatttcaggagaaacatgcttttgaaagaggcagagaactgtggagcatattgcatgataggctatataaacagagccctggaggtcagtgtgtggatgcaaaccaattaaataaaagaacttactggctttgctttctatcatctggatggggaggatcacaagttaacatgcacaggattgaagtataaactttgcttaaataagctaggcacctttggaaatttcattaactctttcaatccactgctaactatactttcaaaaaccaaagtctctgggaagtttttaaaaaatccaaaatatttgttctcttggccctctgtacatatccattggcaaagagtaatggactagtaatgagtaggatggaagaaaaagtgaaggatgagggtgaaaagaccaggagttggctctgtcgccaaatttcaagaacatgcacgtctctcaaacacaagccatttggaaaagcagagctcttgcaaaataactgaaaaaagatgtttttctcttctgaattctgggtataaggatataggtggaatttactagtcactaatataacatcaggatattgttatttctgttccaataaagtagaatagctttctgaccaagaagaatcttatttataagttaaccttaacttattaacttatttataagttaataactggatgtgaaggacagcttgtaccgtaattctgtggtcccaaccttatcaggcaatgtttgggtgagaaaatgaagtaccaagttaaatggtatagattcatggtccataaacattcaaaacaaagattttttttttctatagagtcatgttggctgagaaagtgaataagcttatgtttagtgcttgttgattctgggctgcttggaatagctatactaaggaaatgggctcatagaacacagcaactcaaaggtataagatttcatgaaagcgaattatggaggattaagaaacctaatgagcatggtttagtgtgcggagttgaggagggagctcactattaaataaagccgagagtgtagaaggttaggagatcctaaaagacatgattataaaaggcacaacagaatataattatgctgaaggagggagggcggaatccaaggaacaaaaagcagctagtgtcgcttttaggatctgtagttaaaaaggaatctacaccagggtaaggaaatcaaagaacacaatcagttaaagcttgaggcaaaaacataagggcagggaaaaatagagtggggctgttaaggtagtcactaagttgaagggaaatgaggaatttgaatgtagtagaaatagagttttgaaagcttattaacaaatgagagaatttgcctaacatagtaaactttcctcaagaactattaataaggaaaatattttcagttcttgttagcatgagaatatgttgacaatagtttttagccatacagtttaatttcttcattttaaatttcttattttaaactcataacattgaagaacaaggaaataaaatataaatatttatataagaatattgaaatctgcatttgggcatcatttatcagcagaaataagaaaaatattgactattcatctattcattcattcatcatatatttactgggcataccatatgccagatgttgaggttatagctgtgaacagggtggatacaattccttctgtcatggaatcttatgctggttggttggtccatggtccattatacaaattcacatgaacttacctgcatacttaactgaggaggcctaacaagactaaaacttaaatctaaatggtgagtcaaagacctcttgatatttaaacataagccaatttattttagatttagacaaattcacctttctttactgtattcaagcgatatcatgctgttttccacagacttttaagagaacagcctaataatgctaatggttagggtgtaatttttctagcgttttcaataaggagtgacattttccatttgattatcatctttaaaaaatcaacttagatgagaacacactgacaaatatttgtgaataccgttctattctttgtttttgtttatttcttttacaggatcctattcaagattagcctgaaaaatcaggcaaccttctctatagcaatctttctttctttcttttttgagacggagtcttgctctgtcgcccaggctggagtgcagtggcgcgatctcggctcaatgcaagctccgcctcccaggtttacgccattctcctgcttcagcctctcgagtagccgggactacaggcacccgccaccacgcctggctttttttttttttttgtatttttagtagagacggggtttcaccgtgttagtcagatctcctgacctcgtgatcagctcgcctcggcctcccgaagtgctgggattacaggcgtgagccaccgcgcccggcctatatcaatctttcttgattgaatagaatcaagtagaggggacacggctcttcatcccgttttctaaactaacttgaccaggaaacagcaaggcatagtggctaagtgctgaggtttgggtcagatagatgtaagtctctctttcgaataattttctattgattttctcagatttcatatgtacccttatgtcacatacttacattttgtattttttcttagaactggagcatttaaaagctatgaatttccttcattggagctttagttgagtcctagagttttaatattttatttatttttattatttttttagaggcagggtctctattgcccaggctggagtgctgtggcacgatcatagctcaccataaccttgaactcctgggctcaagtgacctcctgcctcagtctcccaaatagcagggaatacaggtgcacaccaccatgccgggccaatttaaaaaacatttttgtagagactggatcttgccatgttgcccaggctagtctcaaactcctggcttcaagcaatcctcctgcctcagtcttccacagcactagaattaggcatgagccactgtgcccagcccaatattgtattttaaataaatgcagttttgattttcttttggacatgatagttacttaggaagctttttttttttaaatttccaaattttctaccttctacttttattaatgtttttcagttttattgtttggtagtcaaagaatttggccttactactttttagaaagtctattattcagtacttattaaagttttttttttggcctcccatgtatttaatttttgtggcttttttgttggaaaactacattctctgcaatgtaaaggcttcagtggacatttattagacaacctgattcatgataattaatcctttgtatcattatttatttggtttttattttatctgacaaggacagtgaaaggaatgagtttgtaatttttttttttttttttttgagacggagtctcgctctttcgcccaggccagagtgcagtggcgccgtctcggctcactgcaagctccgcctcctgggttcacgccattctcctgcctcagcctcccgagtagctgggactacaggcgcccaccactgcgcccggctaattttttgtatttttagtagagacggggtttcaccgtgttagccaggatggcctctatctcctgacctcgtgatccgcccgcctcggcctcccaaagtgctgggattgtcattttttattttacctgaattctgcttctttagatattaccatccctgtgttgtcagctccacatactccataagtctggtggcagccaatttacttgggacatgcgttacacttgtctccttgtagagaacattactgcaaagcaatgctcatagaaatgaaggctgctaaactaacacaggaacagaaaaccaaacactgcatgttctcactcataagtgggaggtgaacaatgagaacacatggacacagggaggggaacatcacacacaggggcccgtcagggggtggggggataggggagggatagcattaggagaaatacctaatgtagatgacgggttgataggtgcagcaaatcaccatagcacgtgtatacctatgtaacaaacctgcatgttctgcacatttatccaagaacttaaaatatatataaaagaaagaaagaaatgaaggctgctgcaaagaggaaacatattattccaaactcatatgtgaagcaagaagttgctgcaattaccacctgtaaatacaagtgctctcctcctccctcatatctcatagctttataaggaaagaggctctgagactttatatgattcaaatgtttgttttctccacttaagatcgtcccccgactactccatcttgttggcaaggttctatttaccttttaatgctcacctcaaacattactatatcaattaaatgtagccttccttgacaccttcccagcagtcagccatctgtttctttgtgcaaatgctgactcttgtagcacttatcatctgcagtagttatttgtgtggatcttttctctctctccaagtctgtgaatttcttaaaggcaagaaccatgtctcattttcctttatagccttgatatcattttttatttttttgagacagagtcttgctctgttgcccaggctggagtacagtggcacaatcttggctccctgcctcctgggatcaagcgattctcctgcctcagcctccccaatagctgggattacaggcgccctgccccctcctccgtcccccgcccttctgcaaccatgcctggctaatttttgtattttcagtagagatggggtttcaccactttggccaggctggtctcaaactccttatctcaaggtatccatctgcctcggcctcccaaattgctgggattacaggcataagccacagcgcctggtctatagtcttgatgtcttatatgagataattactcaataaataaaagttccatgaagttggaaatttttgttctttaatagtaatagaaatacataactaatgatggaagatttattctccccttttatagtgttgggttgctgctgggaagtggctacagggccagagttgacaatttccaggccctttgcatctatgtggagacatgtaactaatttttgcagtagaatgtatgtcatttttaggttaaggggattaagtagccaatatgctttccttatatcacttttcctcttctgaggttaactcatagttacatgttgaacatgatgccatcacagtgtggaaggagtttggatccatacatcatacttggaggagatccacgcaggagagccattcatcctagaatatcttcattggacttcatatattatgaaataatttttttatgataagccactaagatttttctatcacttattatagcagctagtgttacttacgttgactagcccagtgcttagactagtccttggcaaaaagttatttgcctgtaattattatctagtggcaaatatccctggatagtttttggataaatgattgaatgagtggccaggaattacattatctaacctgaagatgatcctttaaaccaaggatcatacaaaaatagaatactatgttctatatagtcatcaagcctatcagctacatattatcacaataatgcagtataataggtcacctcaaaaagtggtgatttgaaacaataatcatttattcatgcttacatgtctatgggttggttgggtgttggctggcacatgctagttgcaggttgggtccaggtctgttccacacttgtcaatgatggtagaagataagagggcaagcccaactatgcaagcacataatgatatgattataaaacaccttgaaaatataaaatgtagtacatacaggtttgtatatggttgcgatgtggccattagtaggccattaaaaaggttgctggccacacacaaaaagtagcgttaatggccttggtgaattttttgtgtctagtatctggctattaactttcaggctcagaaacctagatgtttcactatctctcagggatgggctcacatggacaaacccagaagactgatggatgaagccagaatgctatgtatttctttataatgagaaatgtaattttcacatgagtgagaatacttacatctgcatgatcagtgtcttctttttttgtaagtaatccagctatatgagacacaaaatcgcaagaaaaattcacttgatcagtttaccaacataaatcattaatgactgaaatttccttactgtaacatatatcagcctaaagctagatatctttgagaagtcgaatcaaaatggaggattgctgttgagtacagactaagaacaaagaaaacaaattgaatgtttagttttatgagttcaagttaacaattatctatctccaaatagggatggtcctggctagtgagacctcttatgacttaaatttaattggccacaacttcattcaaccatccttccatccatccatccatccatccatccatccatccatccatccatccatctacccatccaccatctacccatccatctatataaaagatagccttgctgttggacctggacaatatactgcaaattcattgcctaagaccttgtttccaaattcacagagcagaccttggaagcgattgtagagctgacaatttacagtttaaatgtttcctaccttattgaaataaatattaaaattttagtggtttaacaaatcatgtcagtatacttaaattaacgtgtagaacaaggtcagtatatagatcaaaatatagaacatttccacctattatgttcccttataactttcttcagtcagtccccactcatcagaggtaaccactcttctgacttcagtcaccacagattaaagttccctgttcttgaatttcatataaaatagaattatatggtatatactcttttttatatggtggcttttgctccatatcatgtttttgagatttattcatgttatttgtacgttatcaatagttatagctgagtagtataaattgggaagtatattttgctccaagtttggctaccattgatgcagttgtgtttactgagcagtcttggtttctaatattctcaggtccagaagactgctattaatatattgaaccagtgtgtaggcatttttactttgactcagtgatcagtcatgatcagtcagtcaatttgcatgtgcatgtagagcacttactctatttaagacatggcgaaggacatatgagtatgagacagtttctacatttgtggagcttataatctaattaaagagatgagatatatacatatgaagatatctgtaggttcagggtaatttgaatggtttcagcaatggagtcctaaaagaatttagaagacatgaattactttagagtatggtgattgattggggcagttgcacggtggaggtagaactgaaataatcaagggtagaatatggatagatataaataaagaggaagataattttaaatagagggccccttaaggtcaggcacagagacgtaattgctaaatgtatttgaggaacagtaagtaaaccaacttgccagaactggagtatttttgttggggggtcctgatatagttgggagtctattagaaaccacaggcttggccaaggcagttggatcacttgaggtacaggagttcgaaacagcctggccaacatggtgaaaacccatctctactaaaaatgcaaaaattaaccaggtgtggtggtgcacccctgtaatcccagctacttgggaagctgaggtggagaattgcttgaacccgggaggtggaggctgcagtgagccaagatcgcaccactgtactccagcctaggtgacagagtgagaccttgtctcaaaaagaaaaagaattggtacttaactctgtggccaataataataacgacaatgacagcaaaacaattacaaaattgattttctgcctaatatgtaatatgctctgtactaagtgtttaatatttattaactcatctaatttgcatagaccatacattattattcccatcttataaatgaatagaccaaagcacaggaagtttagatatttgcccaaggtcacatagctagtaagtgacagaactgggatttgatcctaagtagtccgattcgagagtcttaaccaatatgcagtataaaaacctataatatgagttgatgggatgaaaacaatgttttatgcttttttagtcatacaccctattcccacatgacatacttgctcacacagtcacatgtagttgcagaaattttctccccctccaagtagttactcggattcagtagtctgttgagaaatagattttgaaggtactgtaagaattttaattaaaataacatgcatttattcccccagcattaaatttcctgctgagaaagatattcatgaaggatttgttgcaaagaaatgataaggaagagttaactggttctagagaatttataataatttgttttagactaaggctttatttttaacatagatcaaaattaacataatacaattaatacagtttactatggttttgacaggaggtgaaagtacttaccttgtactgatagatatttataaattggaatgaatcgatgatcatggtcaccttctttgggcagcagaacaaggattgtttggctattcattataattgagatatcttgctcattcctgggcagaaataagctacattcaactgcaatgtgtagaaaattttgctatagcacattacttggttgcaggcttaagatttttaacatcttgctccagtatgaaagtattttatttattaaggaacatgtacaaatgtagcaaaactatcagttatttgcttatagtatcaaaatattctagtaaaaatcctttaaaatgataatgactttttagttcttatgtcttgataaatttttcttcgagtcttttgtgttatagaactatcctaagaacattttataagaggttcttttgatttttcattaatttcccaggataggagtaaaaaattaacacatttaaagtaaatttttgcttaatgattgctagtcttagtgaattttgaatatctatgttttagatattcaagtattattccttaattaagaacttaaatagccatatggcctatattgtattcgatgttgcaaattagtaaacttctattatacttgtacttttgtttttgttaatattaaagacatacttaattgatatatatttaagatgtataattgacattatattttcacacaatagcatgtaataatgtttattgaataagtcataagtgaatgaatgacatatagaataatgttttgccatttccaaccaatgtgaaatatttgacgctaacaaatatcatccctttcttcacaaaatctgtctatatattaccatattaccttgcatctaaatgattcacattgtggatggaaggctatatgtagatggtgagagataaaagagacaagaaaatttaatgacaacaaaaatattttgtggcagaacataggaacacaaaacaacaatgtaaagattcaagttttatggcctatcagtggtttttctaccaaaaatagtaaccctcaggtcctccccagtcaatcaaaaatagactttggagttttattcttagatttaaatttatttctatgttagaatagtctattaaaattattttcccctgtgttgttatatagtaatagtaaaatacatttttacagtgtgaatgaaagtggcattaaaattcatttaaatttatacagtagaattatctttttaggaatttgtttaaatttcttgtattttgtggcttgtttgatatcactttttatctacatatttgctttttcaattatactacttaggaatttattcaattttttttcatcacgaccacctgtttagttagcagtatcccttgaaatattgtgatgatatgtggcttttactgatttattagatttgttggggctttttttgttgttttaagtaatgtactaatatatttattttttctagctatatggttttattttttcagggttgtagaagaatactacatatctagaacttagaattgcctataatttccagcatatatgttatacacacacccccaccacacacgtgtatatatatacatgcatatatgtgtgtatatatggatatatatgtgaataaaaatttcctcccaaacgttttaaaatcaggttaaatttatttatgatgaaatatgatttttttccaaaagttttctttgcaaaattagtatgcattttatgcaatttaagaattttataactagcaaatatagttatgtcaaatatggaagcaacttcatagaactatatgtacattatgattttttattaaaatgatataaatttttatgatcaaatgtacaaatcaaaaaggaaattttaacgtcaaaatgaatgtgatttcatgaatttgtaattttaatttacccgtgctcaatttcacaaatgtttgttgatcacacactctgattgagctttgtgcattgccttgaacaagctagctgtaaaatttgtaaaatagtttagtgcctagcagaaataactcttggtgtagaaatatactaatggtagggtagtctttcatgattgtgataagtatgaaagaagattgcctctttctgaagcctgtttattttgtagttaacaaggccaggggagacttttgattattttttgcttgcatgcctacacatacctaaggaaaaagtaatcacagatcccagtgtcactttaattatgccattaatttaagtgttgattcaacagctatttactgttcacagtattttagtatttgtaaatttcttggtggtatgggtaacaataaatggatgtttttatctaaagtaggaaatcacataaatgaacaaagagatgcattgttagtagaattttttttttttttttttgagatggagtctcactctgtcgcctgggctagagtgcagtggcatgatctcggctcactccaacctccgcctccctggttcaagtgattttcctgcctcagctcccaagtagctgggattataggcatgtgcccccacacccgactaatttttgtatttttgtagagatggggtttcgccatgttggccaggctggtctcgaactcctgaactcaggtgatccacccgcctcggcctcccaaagtgttgggattacaggcgtgagccactgcccccggctgaattattttaaatgtagagatatgctgctcgataacaatcagctttattatttactatacatggctgtatattttgagggaaatgtttaaagacagattatattcttaaatgtgattaaatgtaatccctattttgtaaccagttttaaagaaataatattttatgcattttcaaagtactttaatttattttgtagaaattcaaaggacattatatcttttataaaaagattgataggaactgccttttctattttattcttcttactggtagatttaataattttcctcttttggcatgattttttcgaaagatatttcccaattcatatgaattttgatatctattatgtgtcaccatacaagtaatgagtctatgtaacaaaaagatgaaagcttctatatttatctgttatctacatttgttactaagagtcaacaggatggctttatataggatgatcagaaacaggaaagctgtggtttagaaaatgttttaatctgtttcaaataacttagcagggcaatctggtaaaaatgacatgattaatgactgaagaagattaaaatattttcacattctgtttttaatgacctctatcttaagtttctaccctaaaatttacaactagtaaaatattataggaaaaatatatcattcataatcctcttgaagtcgtgttttaccttatcaaattgtgccttctttttagccaaaaatagcataaatgtaaaacaaattttaactgaaatatagcttttgtgatattcttaaatacattcattaaagtgttaatatttactaggtttaacataaaagatctaagattatgttttcaattagggtaacacttcagtcagtgtgtaattttttaaaatttattcttacagctaggcagatcttcatcatttggaaacaggccattttagaaagtttaactctaaatgttttctaagtgcataaataggtggcatgtataagtattaatgttggagttttgcccattgattctagtggctctgtcttttttatccaaagataatgatgtgtattcaatctctgtcatatttacctagaggaagtctttttaatccctcatttttctccttcactgaggttatgtgtaaatactacataaaacagcaaatagaaggaagtctgttttgtctaaagataccattcatcttaaacaaatacatcagcctgtctccgaaaggatagcgatatgggttttatttggtgggagaaggaggaggatggataagaccaaagcaaaaatatgtggcaaattatatgaactgttattaaatccctttaaaaattggttacatttttctgattgtttctgcttaggggaatcacttcaatgccacccgacattgttacagcacctcttaattttcattattatttgcgtatttattcattcctattttcatagttaggaaaactggtattgatttctgacagaaatctgaagctaatctttaattagatatcttatagcaccattttctggaaagccatatgtatgaatttataattccagtatgggaaaaagaatgtattaccttctcttaattatatctgcttttaattttcattatttctaaatttaaactcccacaaaattaaataaaatagctttctttaatttgctacgctgtgaattcttttgggacagaggcccgttaaatttatctgttacttttatccccagcactaaaaaaattaaaatgaattaatttttaattgcttacatttgcttacttatatttattgtgaaaactaatatatttggtgttacttctgccatcttgtttcctctttattatgcctccttgtggtctttttctttcctttagttggattaaagttttgcccttttaagaaaacttctaggtatatgttaaatatactatttctgtttattctgtctaccatctaattctaacaaacatatttgaccttgtattttttctgtaaatattgggaattaattaatatctataacttccttcatttcagcatgagaactttagtacacttttgtctctgacccctgcatgtttcccattatgcctctacttacttaaaaatcattttttaagaattccattaagcattacagcatcattgttaactcctgtttaaacttaactatttaattttacctatttatttactcattactgtttcttgtatcctgtctttaccttttttagacttatttttcattgtgctgtagttcttctttggctattctttcagaaatggttctagatagcaaatatctgggttattttatatgcagattgtttatttacaactctcatgatatcagaaaggattagaggcagaagacacaccattacacatgtattctttaagagtagttattggtaaagagaacttacatgattctgggatctttatgttgcttccattaagggtggactcttttttcttttgaatgataaacttttttataggtatgctttaaatttagtttataactcattttctaaaatttttctcttggagaaaagaaggaatttgttaggtatcatatggttaaaaatacacttaaacaaatacttcataggcatcttttccatgcaataaatatccagtattgagaaggaacatattaaatagatacctggtttagcgtgttaagatatgcatcttttcatgttgtagcttaaatttgagcttgctggttcttttttttctttaagagtagtatttttaaattaaatacatacaaattaaattttaaagaaacagtatcatctttgattaaatcagaatacacattgcatcaatttttaaatgttattaccatgtctggatacttagttaacaacatgttagagcaattcaaaggatcacaggattttactttgtttttgtagtttacaaagactaatgtagcaaagacctttcatgtcaattttgtcataagtgaaagggtagaattattggttacacagatacatgcacctttaatatagactatatatcctgatatttcttggtcttatctcattatttcaattctgagtttatttatgtaaggctattgtagagctaatgggtgacaggattacagtacaacagcagtatctcattttaaaaacactcagggagtaagtttgacacagcaaagaatatagtttgagaatgaaaggcaatgaacaaggggaaataaaaaaatcagcaacatgaataaataaatataaaatcaatgcaaataatggctaaagagtctacacatttttatgacttttaacttttactgtgaaatagccttccagaaaaattgtgccaatttctcctttcaccactgtgtgtagtattttttttcccccttggacacactgacagtcgctgagtgttactattatcttttttctttccagctctgaatatttctatctgtattttctttgcctatctgataggtaaaaagtagaatctcattattttaacttgcatttttgatgactagggaggttgaatatttttattcttatgtacattgactgtttataattcctttgtgaattgcttattaacttatttttctttggtgaggctggaaataagagcagggcttgagtcagacagaccatcatttgaatcctggctctgtcttttaagcactatgtaacttggggcatataatataaactctctgagcttcaatttcctcatttgtaaaacaatatttataattataatgcctacctcaatgttatgagaattaaataaaataacatagagtgaaatcacttagcaaagtgcttggtatacattaatgatgctgctgctgataagacataaagctggaaatattttcccagttggttgcttgatttttttttcctacaaaaataaaaaataattgtaattagtgtatgtcagtcttttctttcttttatggtatttacttagggtttatactaagaaaattgttcttcacaacaaagagtataaaaatatgatgaaagtgtttttgaatgtgactgagttctaaatggaatcatcaaatttagttacacagactaagaaagaaactaataatttgtaatctttctatttctttaggaaaatattagcattcactgttgttgaagaaatccagaaacattagttcacatatttaacaagtttaaaaaaaaatgttttaagactgacaatacattcccctagattatttgtatatttaggaagggtctctgttattctctacagtgcttttgtgtccaccagaaaatgacgttgtgtttgggccaatgaatgagaaaaagggtcctctccttcccacccccacacccctgcccacactgcagctaaatgactcctgtgggtcaaggcaggtacacagccctggcagtgaggggaacaggatccggagttcagctcccacttgtttcttccaccaggttccttgtgcactgcccagagtgcaccactttatcagatgggactgtgtttcagtgttatctcaaaatggttcttgaaatagtttgagaaattaatgattattttatctaaatccacttgtgtaattcaactaaattgagcagctttttatccaggcacttttataaaagaaaagaagccaagcgcagtgcctcatgcctgtaatcctagcactttgggggcctgaggtggcggatggcttgagcccaggagttcaagaccagcctgggcaacatagtgagaacccgtctctccaagaacatacaaaaattagccagacatggtggtgggtgcctgtagtcccagttactcagaaggctgaggtgggaggatcacctgagcccagggaggtcaaggctgcagtgcgccatgatcgttcgctgcactctagcctgggtgacagagtgagaccctgtcaaaagaaaagaagagaagagaagagaaaagctttttaatttgaatattgtgagcaaaaagcaagagagcactggtacaaatatgcctccctcttttcttctaccttgtttattaatccatgagctcttaagggatggcttcttcctcctcgtaaataatgatgttaatgacatatctggggccatgccctttttcatgtcttcattgttatgggtaaattgatcagcattgtgtggagtatccagcaaaatgtgctctgcagaagtctcacccttcaactgtacataaccatcctgtggtgttcctctctcctgcccttatattaccccatagcttcctatgcatgattctttcttactatcctcacagtcatttctactgtgctctttggagctgtgattccattgtaaatacattcttttttatcctcaaatctcttcacaaaatgttttcttcatttttttttaattgagacttgtttctctcccaaggtccctcttgcagctgcaagagtacaagcaataactcttcattacctccttcagaacctcacttttcctttctcatgtaagaactccttacacagccacttattaactttcatcattgctgtgatttattagctccctggtaatgcccttcatttattgaggattttagttttccactctaattcttgctatcctcacgtgtgatttcagtgaccatgtggaccgtccaatcaacaactgagtgtcttcaacctccatgtcccgatcccttccctttcttcccagtctgttatgtacttcatcattttacttccctgcccatccatcctagactctatggtgaccatttttcacctttgccagtgctctctgggtcctggatttgttttccttatgctaaattccccggaaaaatcctcaaccatctgctttcagttgtagctccttcacacaggctgcatggccctgctggaggaaagagtataattatgggataattgccactaaagatttatggtcttcaatttcaggttgccccttggcactattctgcagtccttctgtgtctttatcacttttctcaaatccccttttctaccaccattttctttttgaacaatcatcttgcctcctatttcatagagaaatttaacactatgaagcttgagcttttctttcctgaaactaacaaacgtttatatctacactgaacctcctttctatatgcttggaggaagagatgtcctcttttctagttcaaagtagtcatctcaactctctcctttgggatgttactccatcagtcatttactctaattcctgaagctctttaattctgcttacttcttccctacagcctgaagataaactcaagtcatactgtcttaaaaagaaaatcaaacaaaaccccaaacgcaactccttcagctttgtcctcttctaactcttatctcctctttccactggaattaaggttctcagtacactacgctgtttgtattttcttttattcataggaataacctaataaaaaaaaatcaaaggaaaactgaagaattactaaaggccaataagcatttgcaaaagtttagcctcactattactcatagaaatgcaaattgcatcaactataagaatatttactcaaaaattagggatttaagagtatggggagatgtttactcttgaatattactagtgggaatataaattgatgcaatctttctgaaaagcaatttggtaattgtttaaaccagtaattccactttgggagacttcatgaagaaaatattcagagataaaagtgaaagaatgttcatagaacattatttattgtggcaaaaaaacccttaacagcctaaatgtccaataacagaggcaggcaaggtaccatactctctacatggaaaaaatccaaatccctgttggattttaatggtagttatttcattgtggtaagattgcagttgatttattatctttcttatagttttctataattttctagtttaatttacaagaacatgtattcagaaatataaaaggtatatatattaattcctaatccttctacccccactgtctttgtctttggcaaaagaatggagtaggaatttttgtgaaacagtgtttgtatgtccataagctttcagtatgttccagttgtttttaaattttcttttatgtagtattgatgttcatgatgaaaaggacagggaatgtgatttgcacagggttttccatcaagtatttgaacgataggaacatgttgacctgcacaaagtgttagaggaggaaaagaggaactcttcagtgaatgatgggcggaagcattaaaggagaaggaagagaaccaacctgaaacaagggaaccaatcatctcaagctaagaggaggtaggttcacatcaataatgggtagattgtctcataatattttcactgaatataagactaacagtcaaacagcctttagttaaaagtaaagatgagttggctccttccccagaaaatgtgagaaagtgattagtgacaggagagtatttctcttcagaggcaagaagctgctgctgttggttaaacagagatatccaggatatgtgcttctggttgtagacttttaatttctgactttacagatgtagactgaaacttattatgtgggtcccctggctctgttttttgtttgtaatttatattcatacaagtaatactgtcatatcaaataatggccagtaagtgataaacagaatgttctcaaaaaaggtgaatagcttgtttttcaaaagttcatttgtaagttggttgttttgaacttagagtacattttactatagaaacaacataacagaaaaattagattttaaggctagttcactaaatatttttaacctataatatacttaaagaagaagccagagtgctggaagagttatcaatataattgttgaagtcatagaggatcatgaaaagttggattagaaagagaaaatttgagccaagtgctaaaagaaaatgggagagtgtcccaggaatccacagatggagaggagaagaggataattgaagacttccaaagtggagttccttgaatgataaaactctcaagggcctgcctgattttcctgctacagtagtactgttacgtgcacctggaattgttagtatttacactcactttaagccaaaccctaactttggttaccaggtcaaattgcatttagaacagattttctgaatcttagccacacataaaaattatgtgaggaattttttgaaaacagaggtgcctgggcccatcctagatcaattaactcaaagtctctgcagttggagcccagacactggcattgttttaaaagctccctagattattctaatgcacatgtagaaggaggggtgaactgctggtcagccttagaagtagtaataaattacacaggggtagaaatagtggatgtctattttttctaccattttacctctgcatctagcatacttcttgattattaatggaaattcaatgaatatttgcttgaataaaagagtgaatcaaggactgaggaatgagtggatttaactagctctaatcccatatattacagttcagcattagggcacaatttatggctagtcctttactgactgtgtctcaatttgtacaactggtcttttgtctgattcccaagtaatacctttggtaccccaattcagtccttcttgtttggttactgtttctcagtcattgttgtcaggaacctgccaagaaatgcgatcctctcaagtcagactcactttctaagatccagaatcttggaaatcttgcccctgaatctcagccaagtagttgcgagcgtgtaaatttggctgacgttttgacttcttcagtactactttctccaagattcctcaagagtgtgttctgtttcttccatttcatgctccctcttgttgacttgttgctctggaacgaattgtagttgtaaatgcacagaaagagttctattattcagtaaggcttgttaattatattatttatattttcttcctcattttttacctttattttttgtattgaaagatgtactttaacagctcccacaatatttgaggattacaaagtttcttagtatttctaacagtttttgttttatatgatttactgctctatagtaaataaaaattctttagtgttatgtcttgtgaattattcctttctattaaaaatattcctttttatttttgtcactgttgttggaattcatttttttttcttgatagtattatccctactttctttatgttgtatgcatttacctttgctattgtcttatatttgaccatatttgtcacttaaatttatgcatgcctcttagaaatataatatagctgaattttgatttttattttttatccattatgagaatatttattttcaaattgaagaatttcaacctttcgttttattataagggagacactttaaaaaatgctagccgggtgcagtggctcacgcctgtaatcccagcactttgggaggccgaggtgggtgaatcacgaggtcaggggatcaagaccatcctggctaacacggtgaaacaccgtctctaccaaaaatacaaaaaattagccaggcatggtggtgggcgcctgtaatcccagctacgggaggctgaggcacgagaatggcgtgaacctgggaggcggagcttgcggtgagccgagatcacgccactgcactccagcctgggcagtagagcgagactccgtcgcaaaaaaaaaaaaaaaaaaaaaaaatgactaccatcttattttatggtttgtgtttgttgttcttgttttgtgtatatatatgtgtgtgtgtatttacctgtttacaaaggacatacatacacacacatatacatataatacaaatattataaaatacagaaaatctcccgtaatcctatgactcagtgttattgttgatgtgtgggtatggatgtgggtacttctagattctttaaaaaatttttttaataaaaatgaatttatcttgagtatattgctttgtaacctgctaaatatttatgccactaaatatttatccataatatccctttatggttttaaaatacattttaatacaaggtatttataaataagtaaggtaaattactctatactctaagtaggaatatgtagactggtggaaagattatctagttactgaattatatatggaatatgaaaccatttatataaaacatgtttgtatgtatgcatatatatgaattagatgcttctatatgcttgcgtatatttatcaaagacttctttatgcttgaattttaattttattttattcaaaacatttttgcttgatattttagaacttcaagcaaaatttcaagaggatataattgttttacttacgtaataaaaaataaaactaacacattcatttaaaatattcaagcaaatgccaacacattagatagcttagataaaatgaacaaattcttagaaagacagaaactactgaaattgacttgagaaataggatatacttgtaactgaatagacaagtaaagagattaaattggtgcttaaaaaactacccacaaaaacaactcccagccagtatcacttcactgataaattctgtgaaatatttaaagaagaattaatgccaattattcacaactcttccaaaaaatagaagaggaggaaacatgtcccaactcattctacagggtcactatgaccctgatggcaaatccagacaacgatcacaaggaaggaaaactgtaggtcaatgtcttttatgaatacatacacaaaatccttaacaaaatactagcaaaccaaatacagcaacatttaaaacataaccaagtgtgatttatcttaggaatgcaaggttggtttgacattgaacagtctattaatataatatgctacaccaaaagaataaaggtgattgtatcagtagacacagaaaaagtatttgacaaaacctgacaatctttcatgataaacacactcaacaaactaggaatagaagaaaacttcctaactcaataaaggacatatgaaaaccgacagctaatgccatatttaatggtgaaaaggcagaatgctttccccaaaacaaagatgtcagttttcaccatttctgttcagcattatgctgatggttctagccaattaggccaaaaaagaaaaaagaaaagaacagaaaatggaaaaaaaataaaagaaagaaaaggcactcagattggaaaggagtgagtaaaactatctctatttgcagatgatatgatcttgtatatagaaaatcctggctgggcatggtggctcacacctgtaatccctgtactttgggaggctaaggtggacggattactcgaggtcaggagtttgtgaccagcctgaccaacatggtgaaaccctgtcactactaaaaatacaaaattagccgggcatagtggtgagcacctgtaatcccagttactcaggaggccgaggcagaagaatcacttgaacctgggaggcggaggttgcagtgagccaaaattgcaccactgcactgcagcctgggtgacagagtgagactccatctaaaaaaaaaaaaatcctaaggaatccagctttaaaaataataacaagttcatcagggttgcagaataaaagatctatacaaaatcaattgtatttctggaagagattgtagaaaatatgtatcattaatttcttaaatttgtggtaaaattcaccagtgaacccatatagggctagtgctttctgttttgtaaggttactaattattgattcagtttctttaatagatataaacctgttctgattatctatttcttcttgtgtgagttggatagattgtatctgttaaggagtttgttcattttatctagattatcaaatttgtgggtatagaattgttcataatattctcttatcctgttaatgtccatgggatcaatagtgatgacctctttttcatttctggttttactaatttctccttctcactttttatcttagttaacctagcaagaggcttatcaatattgttgatcttttcaaataacccgcttttggttttactgattttctctattgatttcctacttctaatttcattgctttctgctctaattttttttcttttcttttgcttactgtagattgtttgctgttccttctttagttccctaagatggaagcttaaatgattggttatagacctttcttcttttctcataaatgtattcaatgctataattttcctataagcacagcttacactgcatcccacatattttgataagttgtattttcattctcatttagttcaaaatatttttaaacttctcttgcattttcttctttgatccatgtgccatttagaagtatgttgtttaatctccaagcattttctgatattctagctatctttccgttattgatttctataattatgctgttgcttgagagcagacattgtattatttctatttttaaaaattagttaagatgtgttttatgggctgggtgcagtggctcacgccaataatcccagcactttgggaggctgaggtgggtgaatcacctgaggtcaggagttcaagaccagcctggtcaacatggtgaaaccctgtctctactaaaaatacaaaaatttgctgggtgtggcagtgcatgcctgtaatcccagctactcaggaggctgaggcaggagaatcacttgaacccgggaagcagaggctgcagtgagccaagatcatgccattacactccagcctgggtgacaagagtgaaactccatctcaaaaaaaaaaaaaaaagaaagaaagaaagaaagaaagaaagaaagaaagaaagaaagaaagaaaacccagcaaagatatgttttatggtctagatgtggtctatcttggtaaatatttcatcttaagaagactgtgtattctgctgtcgttggataaagtagtctatagatgttcattatatccagttgattgatggtgttgttaagttcaactatttccttactaattttctacctgctgggtctgtccatttctaatagaggggtgttgaagtctctaactataataatggatttgtctgtttctctttgaagttctatcagtttttgcctcgtgtattttgatgcactgttgttaggtgcacacacattaaggattgttatgtcctcttggagcattgacccctttatgattgtatagttcccctcttatccctgataattttctttgagctgaagttcactctgtcaaaaattaatacaactacttcagctatcttttgattggtgtcagcatgatatgtgtatcttcattcctttcatttttatctgtatctcttgttatattaaaagtggatttcttgtagacagcatatatttgggtcttgttttttgaaccattctgacaatctctgctttttaagtggcatctttagaccattgacatttaaagtgattattgatataatcactttagtaatagcaaacttgcattgctacttgtaatccaccatagttggattaatatctactacatctgtcattgtattttgtttattgccattggttttttcttttgttttccattattttcctgcctatcttggttttaattgagcattttgtatgattccattttctctatacacttaccataatcatttggaaaagtacaattatacttctttacttctttttctttttttaattattatactctaagttctgggatacatgtgcagaacatgcaggtttgttacataggtatacacgtgccatggtggtttgctgcacccatcaacccattatctacattaggtatttctcctgatgctatctctcccctagcccccaacaccctgacaggccccaatgtgtgatgttgccctccctatgtccatgtgttctcattgttcaactcccacttatgagtgagaacatgcagtgtttggttttctgttcctgtgttagtttgctgagaatgatggtttccagcttcatccatgtccctgcaaaagacataaactcatccttttttatggctacatagtattccatgatgtatatgtgccacattttcttcgttcagtctatcattgatgggcatttgggttggttccaagtctttgctattgtgaacagtgctgcaataaacatacgtgtacatatgtctttatagtagaatgatttataatcctttgagtatatacccagtaatgggattgctgggccaaatggtatttctggttctagatccttgaggaattgccacactgtcttccacaatggttgaactaaatttacactcctaccaacagtgtaaaagcattcctatttctctacatcctctccagcatctgttgtttcctaactttttgatgatcaccattctaactggtgtgagatggtatctcattgtggttttgatttgcatttctctaatgatcagtgatgatgagctttttttcatatgtttgttggccgcataaatgtcttcttttgtgaaatgtctgttcatatccttcgcccactttttgatggggtttgtttttttcttgtaaatttgtttaagctccttgtggattctggatattagccatttgtcagatggatagatggcaaaaattttctcccattctgtaggttgcctgttcactctgatgatggtttcttttactgtgcacaagctctttagtttaattagatcccatttgtcaattttggcttttgttgccattgcttttggtgttttagtcatgaagtctttgcccatgagtatgtctgaatggtattgcctagatttccttctagtgtttttatggttttaggtgcttacatttaagcctctaattcatcttgagttaatttttgtataaggtgtaaggaagggttcggtttcagttttctccatatggctacccagttttcccaacaccatctattaaatagggagtctgttccccattgcttgtttttgtcaggtttgtcaaagatcagagggttgtaggtgtgtggcgttatttctgaggcctctgttctgttctcttggtctatatatcaattttggtaccagtaccatgctgttttggttactgtagccttatagtatagtttgaagtcaggtagtgtgatgcctccagctttgttctttttgcttaggattgtcttggctatagggctgttttttggttccatatgaaacttaaagtagttgtttctaattttgtgaagaaagtcaatggtagcttgatggagatagcattgaatccataaattactttgagccgtacggccattttcatgatattgattcttcctatccatgagcatggaatgtttttccctttgtttgtgtcctctcttatttccttgagcagtggtttgtagttctccttgacagggtccttcacaaccattgtaagttgttttcctaggtattttattctctttgtacctattgtgaatgggagttcactcatgatttggctgtttgtctatttttgttgtataggaatgcttgtgatttttgcacattgattttgtatcctgagactttgctgaagttgcttatcagcttaaggagattttgggctgagatgatgaggttttctaaatatacaatcatgtcatctgcaaacagagacaatttgactttctgtcttcctatttgaatacctttatttccttctcttgcctgattgcccaggccagaacttccaatactatgttgaataggaatggtgagagagggcatccttgtcttgtgctggttgtcaaagggaatgcttccagtttttgcccattcagtatgatattgactgtgggtttgtcataaatagctcttattattttgagatacattctgtgaatacctagtttattgagagtttttagcatgaaggggtgttgaattttatcaaaggccttttctgcatctattgagataatcatgtgttttttgtcattggttctctctatgtgatggattatgtttattgatttgcacatgtcgaaccagccttgcatcccagggatgaagccgacttgatcatggtggggaagctttttgatgtgttgctggatttggtttgccagtattttattgaggattttcacattgatgttcatcagggatattggcctgaaattttctttttttgttgtgtctctgccaggttttggtatgaggatgatgctggcctcataaagtgagttagggaggagtccctctttttctattgtttggaatagtttcagaaggaatggtactagctcctgtttgtacctctggtagaattcatcagtgaatccatctggtcctgggcttttttttttttttggttggtaggctattaattattgccccaatttcagaacctgttattggtctattcagagattcaacttcttcctggtttagtcttgggagggtgtatatgtccaggaatttatccatttcttctagattttctagcttatttttgtagcagtgtttgtagtattctctgatggtagtttgtatttctgtgggatcagtggtgatatcccctttatcattttttattgtgtctatttgattcttctcccttttcttctttattaatcaggctagtggtctatctattttgttattcttttcaaaaaaccagctcctggattcattgatttttttgaagggttttttgtgtctttatctccttcagttctgctcggatcttagttatttcttgtcttctgctagcttttgaatttgtttgctcttgcttctctggttcttttaattgtgatgttagggtgtcggttttagatctttcctgctttctcctgtgggcatttagtgctataaatttccgtctaaacactgctttagctatgtcccagagattctggtacactgtgtctttgttctcattggtttcaaagaacttctttatttctgcctgaatgtcattatttacccagtagccattcaggagcaggttgttcagtttccatgtagttgtacagttgtgagtgagtttcttaacctgagttctgattggattacactgtggtctgagagactgtttgttatgatttctgttcttttgcatttgctgaggagtgttttacttccaattatgtggtcagtttcagaataagtgtgatgaggtgctgagaagaatgtatattctgttgatttggggtggagagttctgtggatgtctattaggtccacttggtccagagctgagttcaagtcccaaatatccttgttaattttctgtcttgtggatctgtctaatattggcagtggggtgttaatgtctcccactattattgtatgggagtctaaatctctttgtaggtctctaagaacttgctttatgaatctgggtgctcctgtattgggtgcatatatgtttaggatacttagctcttcttgttgcattgattcctttacgattatgtaatgcccttctatgtatctttcgatctttgttggtttaaagtctgttttatcagagactagcattacaacccctgctttttttgctttccatttgcttggtaaatcttcctccatccttttattttgagcttatatgtgtctttgcacgtgagatgggtatcctgaatacagcacactgatgggtcttaactctttatccaatttgctagtctgtgtcttttaattggggcatttaacccatttacatgtaaagttaatattgttatgtgtgtatttgatcctgtcattatgatgctagctgattattttgtccattagttgatgcagtttcttcatagcgttgatggtctttacaatttggtatgtttttgcagtggctggtaccggttgttcctttccatatttagtacttccttcaggagctcttataaggcaagcctggtgatgacaaaaatctcttagaatttgcttgtctgtagaggattttatttcttttttgcttatgaagcttagtttggctggatatgaaattctcagtttaaaattcttttctttaagaatgttgaatattgacccccactctcttctggcttgtagagtttctgcagaaagatctgctgttagtctgatgggcttccctttgtgagtaacctgacctttctctctggctgcccttaacattttttccttcatttcaaccttggtgaatctggcgattatgtgtcttggggttgctcttctcaaggagtatctttgtggtgttctctgtatttcctgaatttgaatgttggcctggcttgctaggttggggaagttctcctggatattttcctgaagagtgttttccaacttagttccattctccccatcactttcgggtacaccagtcaaacgtaggttgggtcttttcatatagtcccatatttcttggaggctttgatcattccttttcagtcttttgtctctaatcttgtcttcatgctttatttcattaagttgatcttcagtcactgatatcttttcttctacttgatcgatttggctattgacacttgtgtatgcttcacgaagttcttgcgctgtgtttttcaggtccatcggggtcacttatgttcttctctaaactggttattctagttagcatttcctgtaacctttcttcaaggttcttagcttccttacattgagttagaacatgcttctttagctcgaggagtttattattacccaccttctgaagcctacttctgtcaattcatcaaactcattctccatccagtttgttttcttgctggcaaaaagttgtgatcctttggaggagaagaggcattctggtttttggaattttcagccattttgcgctggtttttccccatcttcgtggatttatctacctttgatgttggtgacctttggatggggttttggtgtggacatcctttttgttgatgttgatgctattcctccctgttagtttttcttctaacattcaggctcctctgctgcaagtctgctggagtttgctggaggtccactccagaccctgtttgcttgggtatcactagcagaggctgcagaacagcaaagattgctgcctgttcgttcctctggaagcttcatcccagaggggcactcgccagatgccagccagagctctcctgtatgaggtgtctgtcgacctctgctaagaagtgtctcccagtcaggaggcacagagttcagggactcacttgaggaggcagtctgtcccttacagagctcaagcactgctccaggagatctgctgctctcttcagagctggcaggcaggaacgtttaagtctgctgaagctgtgcccacagcagctccttcccccaggtgctctgtcccagggagatggcagttttatctgtaagcccatgactggggctgctgcctttctttcagagattccctgcccagagaggaggaagctagacaggtagtcttggctacagtggctttgccaagttgcggtgggctctgccaagtttgaaatttctggcggctttgtttacactgtgaggggaaaactgcctactcaagcctcagtaatggtggacgcccctccccccaccaagctcaagcttcccagttcaacttcggactgctgtgctggcagcgagaattttgagccagtggatcttaacttgctgggctccattggggtgagatccactgagctagaccacttggcttcctggcttcagcccactttccaggggacagaacagttctgtctcattcttgttctgggtgccactggggtatgaaaaaaaactcctgcagcagcttggtgtctgcccaaatggccacccagttttgtgcttgaatctcagggctctggtggtgtaggcacctgagggaatctcctggtctgtgggttgtgaagaccatggaaaacacgcagtatctgtgccagagtgcagcgttcctcatggcgcagtccctcatggcttcccttggctaggggagggagttccctgaccccttctgcttcctgggtcaagtgacaccccaccctgcttcggctccccctccatgggctgcacccactgtctaaccagtcccagtgagatgagccaggtacctcagttggaaatgcagaaatcacctgccttctgcattgatctcgctggaagctgcagaccggagctgttcctatttgatcatcttgccagccacctctttttcttttttagagatagagtttcaccatgttgcccagactgagggcaggtgctattcacaagtacaatcatagtgcactacaatctcaaattcctgtgctcaagttattttcttgcttcaccttttcaaatagctgggactataggtgtgccactgtgcccagctctggttaacttttttagtggttgccctggagtttgcaatatacatttacaactaatccaaacccactttcaaataacaccataccactttgtgggtaacaaaatgcattattgcagaatattcccaaatatttcctgtcatcccttttgtcattgctgtcattcatttcactcatcagtaagttataaacactgaatgcaagtgatttacttgtatttactattattattatgaacaaactgctatccattagataaagaaaagaaaaacatttcttacctacatttattcctcctaatgctctttgtttacatagatctgagtttctgatttatatcattttccttttctctgaagaatgtcttttaacatttcttgcaagtcaggttactggcaacaaattacttcaattaaaaaatttttgttctatgtggtgtatagcatgatgttttgaaatatgtatacattgtggaatgactaagtcaagctaatttatatatacataccacttctttgtggtgagaacacttaaaatctactctctttgcaattttctcaagtatacaatacattgttattaattattgtcttcatgttgcacaatagagctctagaacttgttatttctgtataactgaaattttgtatactttgcccaacatttccccaattcctcccaacccctgactaccagcccctgataactaaccttctactcaactttttttttttttttagacagagtctcagtctgttgcccaggctggagtgcagtggtgcagtcttggctcactgaaagcctcctgggttcaagcaattctcctgcttcagcctcccaagtcgctgggattacaggtgtgcgccaccatgcctggctaatttttttgtatttttcgtagagatgggtttcaccatgttgaccaggctagtcttgaactcatgacctcaagtgatctgcctgcctcagcctcccaaagtacagggattacaggcatgagccaccatacctggcttacttaacttctataaactcaactttttaagattccacatataagtgagatcatgcagtatttgtctttccattcctggcttaagtttacataatgtcctctaggttcgtctatgttgttgtccctaatgacagagtttctttcttttttaaggccgaatagtattctatcatatatatatatatcatatatgatatatatatatacaccacatattccttatccagtcattcattgaaagagaacaatataattccattccatatcttggctattatgagtaatgctgtagtgtacctagaggtgcaactatctcttcaacatactgacttcatattttttggatacataccccagtagtgggatttctggatcatatggtagttgttttttatttttaggggaacctcaatactgttttctgtaaggtctatactaattcccaccaacagtgtaccgtgttcccttctctccacattcttaccaacacttttatctttcaccttcttgataatagccatcctagcaggtatgagatgatatctctttgtggtttgggtttgcattttcctgatgattagtgatgttgagcatttttttcatatatttgttggccatttgtatgtctacatttgagaaatatctattcatgtcttttgctcatttttaaattgggttatttattttcttatttgagttttttatatatttttgatattaacttcttatcagatataaaatttgtaaatattttctcttgttctataggttgtctcttcactctgttgattgctttcttttctgtgcaggagctttttagtttgatgtgatcccatttgtttatttttcttttgttgcctgtgtttttggagtcatatccaaaacacactgtccagataagtgtcatcgagctttctctctgtgttttattcaagtagttttacagtttcaagttttacatttaagtctttaatccagtctgagttagtttttgcatatggtgtgagatgagtccagtttcattctgccacatggctataatctaacaacaaactatccaaaaagaaatcaagaaaactatcccatttgccatagctactaaaaagctaaaatacttaggaataaatttaactaaagaagtgaaaggtctgtgcactgaaaactataaaacgttcatgaaaggaattgaagaacaattagatagaaaaatatcctgtgttcatgggttggaagaattaatactgttaaaatgtctgtatacccaaaactatctacagagtcaatgcaatgtctttcaaaatccaaataacatttttcacagaaatagaaaaaataaccttaaaatttatatggaagcacaagagaccctgaataaccaaagcaatcttgagcaaaaggaacaaagattgcagcatcacaccacctggtttcaaaatttactacaaatctatgctatggtttgaatgtttgtgtcctccccaatatttatgttgaaactttatctccaatgccataatgttaagagctggggtcatttaggaagctctgccttcaagtgtaggattaatgccttatacaagaattagagggaactagctaggtccattttgcctttttgtgttacactgtgtgaggacctggcacccgaggcactatcttggaagcagagagagccagccgtcattagaaattgaatctgccagtgccttgatcttggacttcccagcctccagaactgtgagaaattaatttctgttctttataaaattatctggtctaagatattttgttatagcagtgggaatgggctaagacactatactaatcaaaacatcatagtactagcataaaaacagacacataggccaatggagcagtgtagagagtccagaactaaatctatgcatttatagtctattgacttttgacatagatgccaaaaacacacaatgggaaaggacagtcttttcaataaatggttttgaaaaaccgcaatttttttttttggtctaagaaagtctttattactttctcacattttttctcaatttaaaatctttcagagtacagtattctgtcctggtatgttttttttttttcttttaacactttaaatatttcactctgctctcttcattgtatggtttttgaggagaagtctgacgcaattcttatccttgttccagctgtaggtaaagtgttttttcccttctagcttctttcaaaaatttctctgtcttggatttctgcaatttgaatacgatattgccagacatagatttttttggtatttatccttcttggtattctctgagcttcctggatatatggtttggtgtctgtcattaattttggaaaatcctcagccattattactttaaacattttctctgttcctttttgtcttctccttctgctattcctattaaataaatgtgacacccctttaaaattatcccacagttcttagatattctgttctgtctttttcacttttttccctttgcatttattgttttggaggtttctattgacctttctttaaactcccagattctttcctcagttgtgtctagtctgttgatgagcgcataaaaaggactcttcatttttgccatagtgcttttgacttctggcatttttctttgattctttcttagagtttccattgctttgcttacattatcatctgttcttgcaacgttgctttttttttttccattagagcatgttaactatagttgttttaaattcctggtctgattattagaaaatctctgtcctatctgagtctggttctgatgcttgctctatctcttcaaaatgtgcttttgtcttctagtatggctttttgtttttttaagatggtgtcttactctgtcacccaggctggagtgcaatggtgcgatctcagctcactgcaacctccacctccccggttgaagcaattctcctgactcagcctcccaagtagctgggattacagatgcctgccactatgcccagctaatttttgtacttttagttgagatgggatttcaccatattggccaggctggtctcgaactcctgacctcgtgatccacccacctcagcctcccaaagtgctgggattacaggcgtgagccaccggccttatcttttttgttgttgaaagctgaatttgatatactggataaaaggaactgaggtagtaggcctttagtgtgaagtttcatgtttatctgactaggaggtagactgcatttactattttctgtggctagagacttcttaaatatggtttgagatgtgtagttctttcggttgtaatcttttgttattatacaggagcccttctgatcttgtggtaagatatggggacggggagtgcattctatagacccacaattaggtctccgactttcagtgagcctgcgcccttgggctgtgacttctcagtctcacccttccccatttgatgagacaacaaagctagaaagggccagaattggttatttcccttccccaacagagaaggctggagtgggctggagttgggtattttctttctctgagattgattaggctctaataaatgacaaattgattaggctctggtaaaatactttctcatgagggcaggccttgttaaaaataacacaatcatctgggtgtatttaaaaatggctactttccccttccccctgctggaatcacaagcggacttttctgtgatcttcactgtgacaacctggtagggcttctagaggtaaaacatatgaaagtgtgtcccttccttccaaaaatgggcctctctggagttttaaactcttaaacttgctcacactgaacctccagcaatctgttaattacagcaatatattatatatatatatacacaaaatacatattatacctatatatctatatacgtgtgtgtgtgtttgtgtgtgtatatacacacacacacatacacatacacactgtcatgaataatttaatcatcagaatacattctgagaaacacgttgttaggcaattttgtcattgtgcaaacatcatagagtatacttaaacctagattgtgtagcctactacacacctaggctatgtaatatagtctattgctcctaggctacaaatctgtataccatattactgtattgaatactgtaggaaattgtagcacagtgttaagtatttgtgtatctatacttatatagatacacaagatacacttatatagataaagtatagtcaaaatatggcattataatcttaggggaccactgttgtatatgtggttccagttgttgactgaaatgtcattatgtggcattatgactgtataattttaccttttcctctcttttgccttttcaggttctttaaaataattgagaatttgcttccagattattagtaatttttttcttaacaaaatacctcatccatctatacaatcctttttatgtgttacattatacttcaaagccatattatcaagagttatctagatttattataaaaataacttttatgagttttatttatcatagctgttccttagtaagtcatctacttgagctttatattctgatttttaagaaacagaatgcttagaatcagaacaggagtggtaatgagtacttccatgccttgttataaacacttttggtaattgttgccaaattcttttccagaaaatttgtgctgatttaacttccatctggattttatgggtgtttcaatttttccattccctcttttttcaatattgaatattttcattctttatgatatctggcgtgttgtatttgaaacctagtttgtcatttatgttttaattgcattatttaattattgagtttaaattttataatgtaattattcaactttttttatttcatgtattgccagtttatgtcatttgtgtatttttctattggggtatttatgtactttattgctttgtaagattgctttatatattaaggatattagatcatcttattttatctggttgatatgtttttagatttatttatgttgttttctgtttggcaccagatcaatgcttgttggcattttgttagggaaatggttaggagcatggactttgtattcaaactctagcacaggccaggtgtggtggctcatgcctataattccagcactttgggaggccgaggcaggcggatcacttgaggccagcctggacaacagagtgaaaccctgtctctacaaaaaaatacaaaaaattagctgagtgtcgtggcatgcacctatagtcacagctacttggggggctgaggtgggaggcttgctggagcctaggaggttgaggctgcagtgagctaagatcgctccactacactccagcctgggtgacagagtgagactctgtctcaaaaaagaaaccccagctcagcaacttgctcattgtgtaatcttgggaaattgcttaataacttttagctcttgctaaaactgatataaaacaatagtgccaacttcatggggttgttgagagagattacttaaaaggtttagcataatatctgtcataatttagtaaacactcaatcatttctggctgttactgtttgtatatttttaaacagtgaccaaagcagaaataaagggaatgatgtgaaattaatgaatatgtaagttatatttgctgccctctctggccttttcacatgtacctttccctctgtgaaactaccccacccccacccttttatggggtagcgtatttgatatataatcttattctcattttgtttaatgtcttgggaatgtgttgaatactctttgtgtaggttttcatttaggtatacttttcaaatatgtaaataaagctcagtaaatagaggcctgttttcagattcagtgtatactttaactaagtttcttttcctacttatataacagtggcaattattgaagtgggacatacatcaagtgaataaacgggtgtttccagctctgaatatgccatgaagaccttacttatttttttgattagtgacatttttctcttccaaaagtttagaggaatgggaatgtgagccttccatggggaagtcttacttgtgttgttactttttatatgttttacatatctgtctattctgtggttgaataaaatatgtccttcctatgaccaccagtgcaacttttgtacatatgctacccattatactcagatctcctttttaaaacctcacaagtagaaaggaatgtaaaatttgtactcttttacctttgaaaaacttgcaataatcaccatatctttatgatcgttagattagcaaacggttaaatcctcatgaaattctctttataagctgtttgtagttttcaggcattcaatcattcatgccttatggaaggcaaaaaaacattggttattgatgaaatagaagtaagatagaatcactgttgtattgctactcagtctattaatgcagaattaagctagatttataatatatatacagtatatttatatttaatatatactaaaatataatatgtgtaatatgactataaatttatactatatacttatgtttttatatagatttatttaatatttagatttatatgtatataaaaaacataggatgtgatttttcattatttgtttttacaggaacagaatgctagtgcttgaaaaaggaacataaaagatcatatagtacaacactctcattttataaataataagcttagacaggcagcatatagcttactcaagatctcatgtgggagaacctattgaagaatccagggctgtgttcatgagaccgcacttcctatgactatagtcatgttttcactcaatttcaagccctttttattttaactttatttttaatttcatagttatttctttacatggttaagccagttcaagattttcctattcaataacttgacagatttcctttaaacaagagccatcttattagacactgaagctattaaaaaaattaaggttgctttcactgaaaatgtgcaaaaacaaccaccctggtacttgcagtgttacgtatattcccatcttatggccctaatagaagaataagtagttactttatttctccttcacctatccccttcaggaggtgtcctgccacatgcctgttgtggactttcaaattgtgtgctgtattcaaaggaactcaagaccatcatagttaagttgggctcaatagttaagattgaaaatgatgttttaatagctgcatctttcttattaaacaacatattaaaaatacagctagctctgtgtaattacattgatcattgtaccccctggataatactattaggttggtgcaaaagtagttgtggtttttgccattgaaagaatggcaaaaacgcaattactttagcaccaacctagtaattttctttcccactctttgagaggtgtatggtttggcagtctctatggtaagttgttctattagtccattctcatgctgctataaagaactgtccaaaactgggtaatttataaaggaaagaggtttaattggctcacagtttagcatggctggggaggcctcaggaaccttcaatcatggcggaaggtaaaggggaagcaaggcactttctttgcaaggtggcaggaaggagaagtgccgagtgaggggggaagagcactttataaaaccatcagatctctgagaactcacttgctattatgagaacagcatgggcgaaactgcccccacgattcagttaactccatctggtccctcccttgacacgtggggatgatggcgattacaattcacgatgagatttggatgcagacacagagccaaaccatatcagttgttcttaagaaatcctacactcacctcttggtaattagtgcttaccctatgtcaacagtgtctcttcaaattgctaaaaggtcagaatgtacataaggtattaagatgaacccatctcctgactgagagaaaaggcaggcttaagctaccagtgtttagtggcatatatctcttatgtggaaaggccaagatatttgcttccatcatctttatgctaactccatgaatatctagcagatagtaggtgctttgtcataaatactcttgaggtcagcatccttctttgcttggttgcctggcctcctatgataaaagcaaatgcctgattagttgttgcctgacagccctcagtaaaggatataacttgggataactttttagtactgttctttggctctgagatgttctcgttcctgttttagcttattctcttcttttgctccatgaactctagtctttcttcatagattaatttcatccctcattcagtaatcctaaatattttttcagtgctttactatgtgacaatcactgttattggtgcttgatgtacgttagtaaacaaaacagacaaaaatctcctcacttgtggatcttaaattctagttgggggcaggagacaggcagacaattaaagaaatgcatactaaatatctacattttacaacatattaggaggtaactgctattaaaaaaacccagcagagtaagggggattgggaatgctagggaagacaggggtacagtcacagtttcaataggtcagagtaggtctcagggagaagaagacatgtaagcaaacatatgcagaagaaagggaagctgacaatgtagatattctgggggaaaatggtacaaaggccttatgataaatgtatacctggtttttaagaagaacagagaagcaggccagtattgctgtagttgagggaggtggaggagggtagcaggaggtcatagaggaaatgaaggtcaggtcctgtagggcattttaggccactgtgaacacattggattttactctgagtaaaacaggaaaccaccagatggttttgaatagaggagtgacatggtatgacttctatctttaaaagctcactttggctgttatatacagaataggctatagagagctacatatgaaagcatagagaataattagaaggctgttacagtaatacggcctggggagaatggtagctcacatcagatggtagcagctataggaatgaggtatggtagatttccagatagacagtcatgcatctcataatcacatttcagtcaatgactggaccacatataacaatggtggtcccataagattataatatcatatttttgctttactttttctatgtttagatatgtttagatacacaaatacttatgattgtgctacaatcacctaccgtattcagtacagcaacatgccgtgcaggtttgtagcctaggagcaatgggcgatagcatgtagtcgaggtgtgtagcaggtataccgtctatgtttatgtaaatttactctgtgacatttatataacaacaaaataggctaacagcacatttctcagaacacatccccatccgtaagcaacatgtgactgtaatttaaacatggagccaatagtatttcccaataggaaatgagttgtgtgagaaaggagtcaaggaaaacctcaaggtttctggcctcagcaaccagaaatatgaaattgcagcaattaaaatgaggaagatttcaggtagaataagttcaggtggggcctgggggagtggtgagggaaatcagtaattcagttttgaacatattaatttagaggtgcttataagtcatccccatggaaatgttatataaatgttggagtttagaagagaaaattagagataaaaatttgagagtcataagatatacaggtgatatataaagccctgagagtgactaagataaccactggggaaaggcttttgttagagatcaggatcagagtcagcctgggggcattgcaatatttagaagttggggaaagaggaggaaccagcaaaggatacagggagggagtagctgtgagataggaggaaattcaagaagacaacagtatcttccaagcaaaagtggtaagctcatactctttaggatgctttataatttgaccaaacccctctgcttccaagtgaggtcattgcaattttactgaatttcctggtttctcaggagaggaatttctttccatgagctatgagaaagctgatttagagtctctccacctgttctgacagcagcctcagatggctgtctggagttttgagagatgtttgacagaaggccatagactcttgaagtttgtagctagcaacctacaggaaggacagattcatatatcccatagatagcacctgggttagggtcctgatcaacactgtttcagactgtgtaggtcctgaggcacaagattgaaatttctgctggtcttacaagagaatttagggaaattggaataagcatttgttgaactggtaaatgaaatttctgctggtcttacaagagaatttagggaaattggaataagcatttgttgaactggtaaaatataaggttgtatactcaatatgcttctaccattgtgtcaagggtgtgattctcttctgttttctggtccaaaaattagactgaaagaaaggtagactgaatagtccctggaagggtttaccagccccatcctagatcaactgcctttcatgaccttaaaagactgatggatttaaccctcacttctgcccctggcaggcttatagtgccaagttgtggtttgcaaactctaagaccaacacctaaggattgcatccctggccaccagatcaaagtccagagagcaatgccaagtcaaaatctagcactatttgtgtgtgtgcttgggtaaggtgggatctccagggaggtggacaaagttcactatatatacaaagtgagtcaacagttacagaggataaggcatgaagcagcccagaggcatcttacaaatggtttgcttgttgtcttagtcaacttggatacatcttaaaggaagccaatcctttggtacaactttgcctttgttttttcccatttctaaatcaacacctggggaaatgttccccattaattgctagctccatatcattcttgcctgtgtacatacatctcttctccactgctcagaacacaggaagacttaccctggttgtgattctatctcctcgttctaaacagagtcctggaatttgaaaaacacctatccattaggtactgcaggaatctttgtgatcccatgtaacaatgtatagatgtgttgcttaatgatgggagtacgtctgaagaagtctctcattaggtgattttgtcattgtgtgaacattggagagcatatacaaacctagatgggatagcctactacacacctgggctctgtggtatagcctattgcttttaggctactaacctccacaacatgttaccgtactgaacactgtaggcagttgtaactggttaagtctttatgtatctgaacagatctaaacatagaaaaggtaatgcattgcactaagacgttacaatggctaagatgtcactaggtgtaggactttttcagatccattataatattacggtaccaccatcatatatgcagtccatagttgacctaactgttgttacttagcatgtaatcctttgtgacacttatgataggaatatgtactggtggggaaacgtgaaggcctacagttgcccttctattgccaactcgatagtgtgtagccttggattctctttctattttggccctgcttgggtttcagtacatcttggtttgtattggtgaagtcacatatatgatccattttatcccctgctcagacaacacaagcactacagacacaatgtacctctttctttaataaaatgaaaaagtactgtgtcctttttaatagattctagtttactttctgattctagaagaccctctttactactttccaaatcaagacacatttgttcaactataagatcatggtttatttatttttattatgaattgtaatcagtattttacctctgcctcagatatttgtcctataatacttagtctaattggtgtttgcccctcattaagggaattaatgacattagcaggtaggaaaatgaggaatagtccttgagaactctatctctaacctttactgtgttaataagaagataatagattaaaatagcttattttattttgttaatttccttttttaactgacaagtaaaaattgtatataattatggtgtacaacatggtgttctgatataggtatgtgttgtggaatggctaaatcaaactatttttaacatatgcattacctcacatatttattattttggtgaaaatacttaaaatctactctcttagcaattctcaagcataccataggttgttatttactgtagtcaccatgatgtacaataggtctcttgaacttatttctcctaactgaaattttgtgtctttgaccaacatctccccaaactccttcctcttacccttggtaaccaccattctactctgtttttgtgagttgaaatttattagattccatatataagttagatcatgtggtatttgtctttctgtgcctggcttgtttcaattaacataacatccttcaggttcttctaagttgttcaaatgacaggattttcttctttataaaggatgaatagcatttccttgtgtgattatataccacattctctatccatttatctactgatggacatttaggttgattcccacatcttagttattgtgaataatgctgcaataaacatgggagtgcagatatctcaacagactgatttcatttcctttggatatgtactcagtagtgggttgctggatcatatggtagatctgttttcaattttttatcataatggctgtgctaatttacattctccccaacagtgtacaaaggttcccttttctccacgtcttcactggatcttgggacggagttttgctcttgtcacccaggctggagtgcaatggcatgatcctggctcactgcagcctctgcctcccaggttcaagtgattctcctccctcagcctcccaaataggtgggattacaggagcaagtcaccacacccagctaatttttgtatttttagtagaaacagggttttgggaagttatctatcaagtcctttgcccgtttttaaattgggttatttgttatcttattattgacttgttggagttccttatgttatgtttcgtatattacactcttatcagatgtgaggtttgcaaagattttcttctatcctataggttgtctctttgttgtttcctttgctgtgcagaaactttttagttgatataatgctatctatttttgcctttgttgcttgtgtttttggagttatatccaaaaaaattattgcccagatcaatgtcatggagcttttccctgttttgttctcgtagttttacagtttcagatcttatttttacatctctaatccattttgagttttttttttttaacctctgaactttttattggcttccagctccccagagagtaccctgcttctgctggcttaatgtctcagaactttggtgtcattgatctcagacaccactttgccatccactgtctggcgggtggtggtcttttggatggtttgcatggagttactgctgtccaaggcatcaccaagactgaagtccttgatgtcttctggcaggcagtgatacatggcaatctcagcctccagcttgaccttaatgttcagcagggcctcctactcctgggcctggtgctgcccctctgcccgggtctgtgtcaactccaactccaggtgcagcaggatcccgttgagttgctccatctgcagggtgtaccaggcctccacctccctcaggctgttctccaagctggccttcagatttctcatggagtccaggtcagtctccgaggactgggctgtatgttacagctcatctgttgagagcatcatctcaacagctccaaccttggccaactgcatggtgaccactgtggtactctccttaatctgctgagaccagtatttgtccagcccttctcagttcttccgagccagctcgtcatattgggcccagatgtctgccatgatcttggcaaggtcctgagatttgggggcatctacctccaagatcaaaccagagctgacaatctgggcttgtaggccttttacttcctcttcatggttcttcttcattaagagcagctcctccttgagagtctcgatctctgtcttcagctgcagctgagtgacactggtgtcatcaatgaccttgcagagcccatagatgtcgctctccacagactggcgcatggccagctctgtgtcatacttgactctaaaggcatcagcagcaagatgggcattgtcgatctgcagaacaatgtggacattgtccacagtatttgtgaagatatgagccctcaggtcctcgatggtcttgaaataatggacccagtctctgacctggggtcctgtcttctccaggtgctcccagattttactctccaccttccagttcttggtctctgggctcctcactctgtccaggtagtaggccaggcggtcttcaggctttgcatggtctccttctcattctggatgcctcccattcctgccagacccctagccatccctccggccaggcccctggaccccaagcagccccggaagctggtggagcaggacatggagatccgggaaccagagcccccagtgcctgcatagacgttggttgtgctgctgaccagccaggtgccatagctgggcacctggatggagcccagggatgggtaggtagttggtggacaaggtggagcgagtggtgaagctcatgctgtctggggaagagagcgggaagagaggactcaggctttgctgataaccttgagttttgtatggtgtgagatgaggctctaattttattcttctgaatgtggatatctagttttctcagcaccactgaagagaatatcctttcctcattgtgtgttcttggcatctttttcaaaaataaattgagcataaacttggactttctattttattccattggtctatgtgtgtgtttttatgccagtaccatgctgttttgtttactcttgctttgtagcagattttaaaatctggtaatgtgatgccttcagctattttttttttccttatgattggtctggctatatgggagtcacttgtggtttcatgcaagttttaagattttttttttctatttctgtttaatatgtcactggaattgttaaaaatctttatttttttaaatttttaattaaaaaaacttttatttaagtttgggggtacacttgaaggtttgttatataggtaaactcatgtcacaggggcttgctgtacagagtattttgtcacccaggtactaagcctagtgcccaatagtgatttttcctgatcctttccctcctcctgccctgctccctcaagtaggccccagtgtctgttgtttctctctttgtgttcttgtgttctcatcatttagctcccacttataagtgagaacgtgcagtatttggttttctgttcttgtgtgctaaggataatggcctccagctccatccatgtttctgcatatgacatggtcttgttttcttatggcttcatagtattccatggaatatatgtgccgcattttctttatccaatctaccaatgatgggcatttaggctgattcagtgtctttgctattgtgaatagtgctgcagtgaacattagtgtgcatgtgtctttatggtggaatgatttatattcctttggtatatcagtagtgaaactgctgggtgtaatggtagttccacttttagctctttaaggcattgccacactgctttccacaatggttaaactcttttacactctcaccaacagtgtataagcattcctttttttctgcaaccttgccagcatgttatattttaacttttaaataatgtcctttctgactcatgtgaggtggtatctcattgtggttttgatttgcatttctctaatgatcagcactattgacctttttttcatgcttgttgaccacatacatgtcttcttttgaaaagtgtctgttcatatcctttgcccactttttaatgtggttgtttgtttttttcttgtacatttgtttaagtttcttacaggtgctggctattgggcctttgtcagatgcatagtttgcaaatattttctcccactctgtaggttatctgtttactctgttgatagtttcttttgctgtgcagaagctcttaagtttaattagatctcatttgtcagtttttgcttttgttgtgattgcatttggcatcttcatcatgaaatttttggcagtttctatgtccagaatggtattgcctacgttgtcttgcagggtttttatagttttgggttttacacttaattttatatccagctaaactaagcttcttcagtgaaggagaaataagatctttttcagagaagcaaatgctgaggaagtttttttacctccagacctgccttataagagatcctgaaaggagcactaaatatggaaaggaaagaccattaccagctgatgcaaaaacacatttaagtacacagactagtgacactacagggcaaccacacaaacaagttggcataataagcagttaacaacacaatgacaggatcaaatccacacatgtcaacactaaccttgaatgtaaacaggctaaatttcccatttaaaaggcacagaatggcaagctggataaagaaacaagactcaatggtatgctttcttcaagagacccatctaacatgcaacgacatgcataggctcaaaataaagggatggaggaaaacctaccaagcaaatggaaatcggaaaaaagcaggggttgcaatcctatttttagacaaaacaaactttaaaccaacaaagatcaaaaaagacaaagaagggcattacataatggcaaagggctcaattcaataagacctaactattccaaatatatatgcacccaacccaggagcacccagattcataaagcaagtccttagagacctacaaagagacttagactcccacacaatagtagggtaagacttcagcacttcattgccagtattagacagataatcgaggtagaaaattaacaaagatatttaggacctgaaaatgtttaatttttaatttttgggagtacatagtatatatatatatatatatatatatatatatatatatatatatttatttatttatttatggggtatatgggatatttttatgtaggcatacaatgtgtgataatcacatcagggtaaatggggtatccatcacctcatgcatttatcctttgtgttagaaacaatccaattatacccttttaggtatttttaaatgtataattaaattattattgaaattttgatggtgattgcattaagtctgtagatggctgtgggtagtatgaatatttgaacaatattaattcttttaatccgtgaacataggatatctttctgtttatttgtttcttcaatattttaaatcaatgttttatagttttcagggtacagatctttcacctccattgttaaatttatttctaagtattttatttgttattgtaaatggaatagttttcttgctttcttttttgagtggttcattattagtgtatagaaatgtaactgagtttcgtatgttgattttgtatccacccactttactgaatttattagttttaacaggtttttggtggcatctttagggttttcttttttttttttttttttgagacagagtctcactcttgttgcccaggctggagtgcaatggtgcaatcttggctcactgcaacctctgccacctgggttcaagtgattctcttgccttggcttcctgagtagctgggattacaggtgtgtgccaccatgcctgactaattttgtatttttagtagagatggggtttcaccatgttgaccaggcttgtctcaaactcctgacctcaggtgatctgccttcctcagcctcccaaagtgctgggattacaggcatgagccacagtgcctggtgggtcttctatatataggattatttcatctgcaaacagggacagttaaacttctgcctttccaatttgggtgtattttatttttcatctttttgcctaattgctctgactgggacttttagtacaatattgaatagaagtagtgagagtaggcacccttgtcttgtttcagatcttagaaagaacttttcacttttgagtttgattttagctgtaagcttgtcatatatggcctttattgtgttgaggcacattcctactatacctaatttgttgagagcttttatcatgaaaggatgttgaattttgttccatgccttttctacttctattgagatgatcatatggttcttgtccttcattctgttaatgtggtatatcatattattgttttggttatgttgaaccatcctcgcacctcaaaatctcacttggtcatgatgaatcattcttttaatgtgttgttgaatttagttttctaatattttgtttagaatttgtatatctatattcatcagggatattggcctatagtttcttttcttgtaatgtcttgtctggctttggtatcagagtaatgctggcctcataaatatgtttaaatgtattcccatctcttcaattctttggaagagtttgagaaggattgttattagtacttctttaaaaggttggtagaattcagtagtgaagcaattagatcctgggattttatttgatgggagacattttattacttattcaatgtccttccttgtgattggtctcttcacattttcttttacctcatgattgagtcttagtatgatgtatgtgtctaggaatttattcatttcttctaggtcatccaattttttggcatataactgttcatagtagactcatgatcatttgtatttgagtgctatttgtgtaatacctcctttttcatttctgattttgttgtcttttttttttccctgatctacctaagggtttgttgatcttgttttacctttttaaaaaaccaacttggtttcattgaacttttcttttttgtctagtctctatttatttctgctctgatttttattattttcttcttcctgctatctttttgcctagtttgtttgttttctagttccttgagatgtaacgttaggctgtttatttgagatctttcttcttttttgatggaggcagttattgctaagaactttccttttagaagtgattttgctgcatccgataagtgtcaggatgttgtgtttctatttttgtgtatttcgagatatttttaaatttttcttttaatttcttctttgaccttttggttgtttaagagcatgtgtttaacttcttcacatgtgtgaattttctgaagttcctcctattattgatttttggtttcatattatagtggttggaaaagatgcctgatacaatttcagttttcttaaatttgttaagttgtgttttgtagcctaacatatgatctgtcctggagaatgttccgcttgtgcttgaagagaatatgtattctgctgctgttggatagaacgttttgtacatgtctgttaggtctgtttggtatgaagtgtagttcaagtccggtgtttccttattgactttctgtctggattatctgtccactattgaaagtgaaaatattgaaactctttgttattattctattatagtctatctctcccttcatttgtatcaatatttgctttatatatatatatatatctcaatatttgctatatatatatatttaggtcctctggttttggttttatatgtatattatatatatttacagtagttatatgctcttgaagaattgactgctttatcgttatataatggccttctttgtctcattttacagtttttgacttttaatccattttatctgatataaatatagctacacatactctcttggtttctatttacatggaatatctttttccatgcttttattcttaatttatatgtgtccttataggtgaagtaagtctcttgtaggcagaatatagttgggtcttgtgtttttattcatttagccaatctgtcttttgattggagaagttggttcatttacattcaaggtaattattgataggtttggcctcattagtggcattaaaaattattttctggttgttttgtagattcattttttcctttctcttttatgactttcctttgtaagtggatcattttctctagtggtatttttgatttctcactctctatcttttgtatatctactgtagctttttgttttatgactactatgagacttatataaaacatattatagtcataataggctattttaaggctgataacaagttaactttgattgtattacaaaatcctacacttttgcctcacccatctctctcacattttatacttttgctgttacagtttacatctttttttttgtatatccctcagcaaattattgtagctattatttttaatagttttgtcttttaactttcatactaaaaatttaaaggatttctacaccatcattacattataaaagtatcctgaatttgaggatgtaattacttttatctgtgagtttcatactgtaatttttgttttagttttttgagatggagtcttgctctgttgcccaggctggagtgcagtggtgtgatcttggctcactgaaacctccacctcccaggttcaagcaattcttctgcctcagcctcctgagtagctgggaccacaggcatgtgccaccacgcctggctaattttttctatttttagtagagagggggtttcaccatgttggccaagctggtcttgaactcctgaacacaagcaatctgcccgcccgcctcagcctcccaaagtgttgggattacaggtgtgagccactgcgcccagcctctagtgtttttatgttactattttttgtctgttttttaagtttaaagtatttcctttaacatttcttttaagagggtctggtgatgttgaactcacttagcttttgcttatctaggaaagtgtttatctcttctttacttctgatggacagatttcctgggcattcttggttggcagtcccgtcctccccctgcacttatatcaccccactctttcctggcctgtaaggttcctgctgagaagtatactgctagccttatttgaactcccttaaatgtgattgcttctttcctctggctgttttcagaattctctctgtctttaatttttgacagtttgattatagtatgtcttgctgtagtcttacttggattgaatctgattgatgatatttattaccttcctatacctggatatttgtatctttccctagatttggaaagatttctgctattatttctttaaataagctttctggctctttgtctctttattctcccccaaatcctatagcatgaatatttgctcttctgatgctatctgataaatcccttaaggttttattccttttcattctttttcttttattctctctgactgtattttttaagataacttgtctttgagttcatagattctttcttctgcttaatcagttctttttacttctctatgggttttaaatttcattccttgtattttttggctccctaatttcttttttaaatataattttaatctttgttaaagttcttgttttggtcttacagtgttttcctaatcttatggaattatttctctatattgtattgaagtttgctgagctttcctaaaacaattgttttgaattctttgtcaggcagtttgcatatctccatttctttagggtcacctactgggaaattattgtgttctcttggtagtggtatgtctccctggttttttatgtttcttgttgccttatgttaatctttgcacatttggtggaacagtcacctcttctagattttatgggctagctttgctgtggaaagtccttcttttattgggggcttccagggaacttgctgggtgggggatgtagcaattctagcaccagtgaaggtgcagctgtgtatgtctctgcagctctgtcagctgaggtcattgttgatggagattgcagtgatactcagcagctgataccacagtggcagtgagggtttctgggttttctgtgtccatagtggcagtggcagtgaggattgtccacagtggcagtgagggtttctgagttttctatgataatggcagctaagggcctcctgatttctttttctttcactgaggaagttgtggctgaggggatttcttttggcactggatttggcttgcaggcccactcgcagtttggtgtggcactagtgtctgatgagtggtgcccatggagcagccatggagctgaggcctgaagcacaggcacaaaaggaaggaatatggctctgggctctggggtgtaatggcactagtgtccagtgtgcaggcactctcactgccacactgataacagtatgtaaagctcagattcttgtaaagtagccggggagtcaaaaactagagcacaaatgtgtgtagttacagtggttttggagtcagagcagggcctagctcactgtggtggctgagctggtgcctggagtgcagccatgcacagcaagagcttaactctaggttctggagtacaaattagcttgctagtaagctccagtgtctgaaatgctccagtgtctgaaatgtggacaaacccagtgcagccacaggacccaggtctagagtgtgaggactcaagaggtgtccagagttgaggcacttaggggatttggagagttggtggcttctttcccaaagcagctcaacagtggccacttcttgggttggtgaggtgtgtgtagctgtgtcttcctctctggggttccctgtgaagaataatggtttgttatttcagtggcaaaagatattgttgtcatctgcagagcaggctgctgaggaccatggtggttttcaccacatggctgattcagacaacctctgctattcttctttgttctgggcaatatcctggcatctcaggtatactgatcttaccagttatttattttctgtgtgtatattttttttttgctccactgtattgttgcaaaatcttaaataggatcttggggactctctggggttattttgtttggagatagctgtctatgtttattttgggggtgctaaagggagaaagctgatatctcctactctgccattgtggttacatccctattattcatttattcttttaaacaccaattcaacacttgctctaatggactgggcattgagtatatatggtacagcatagactcaggcccttccttaattaagtgagtttttaaaataagtttacaaacaggagtacgacattattggcactagcaaatctaatcatgtaacccctctgcccagagtttttccaagggcttctaattgactatgggatgaaatatccctccctttgcatgcaatcaaaggctttcatgacctagacctttctctgtctatgttcaatttctctacttcccacccccatctttagcaattggtattttagaaaacgctaaactaattccccagaatgcattgtgctgttattgttgtttcgtgcccctacatatggggtgtcctcccttggaatatcctttttttccccataagatagacatggggtttctttctactagaattatatgccccttgtaaaacagctctcttatgattacttaccagtctctattgtctttataatttttttgagggtgggactgtatggttgcctcttgttttacccttggcctctagtatagttttaaacacatccattaagtcaatatctactgccttagggacaggagatacagtggcaaacagacagggctcctgctattaaggagttactaaacaaggaaacaaataaatgggatgatatttgataggagctatgcaggaaatagaaaggatctatttaaccctttgatattgttgatcccatgatagggaatgatggtggtaggtggagggagacgctcatttaaataggcatttcagggaaagcctactgaggaggtgatatctgagccaaggtcgaaagtatgagaatacaaccacacaaagagcttgggggagtgttcaaagcagaagagaaagcaagtatttgatatgttacggcaaccaagagaagaccagtgtggttgaagcacaaggggaagagtggtttgagatgtgtttggagaggtaggcaggagttggatcatgcaggtttttgtccaccttcaaatatttcttgaactgaatgtgtcaagcctgaaatcaaattctgcatattttgtccttatcctccagcatatccttaggcttcatttctctccagccatgttcccactgggcccactgcaataagagtaagagtgtcatacatttctctccagttttattagtgggattttaccagatctggaaatattaaaggaaggaaattgttttcagtgtttggtcttatgagtaggcctttaacaacagctatatcataatgaattcaggatgatgtgaatgatgattgcagaggaactggatatgcacagttcatacagacctctaagtaaagcttagagcttgtttcatttgcttctggtttttatctcagtatgatccagcaacctaaaataatgaaagaagagctccatttccagtgaccagttcagtccctgcactagcagaaagttagtgtagaatccaatgcaaagatcacatgtaaattctagaaattttactacatttttttttcagagatgacaattgaattgcctgctttccttccttccttctttctttgttccttccttccttctttcctgagcactgaaggatgtaagtgctggtttgaagaatctaaaaggcttcagggtaacagtgaagtggacgacacattcttcttccagctgctgctgttcacaacacttctgacagttaaaatacatcacacattctcttgtccttttaatgtaaacatttactgttttaagtggactatagaatcaaaccaaaatagaaggatgcagactgatatttcagaggtgaagctaagcactagactaaattaaataagagtaatttgcaatctaacacatagttataatacatattgtacattatactctgtttgtccctgggaaagattaaacagagggctttcattgcttgctgtatttttacagcctgttactagaaaagaatttcatatagaacaggcaaaattttgaattggaattaagttaaaaataaatggaaaaagtagtaaggtcagggtagcctccttggtgttgattttctcctatgcttaagcatcatctgaaagtcaagaaaatgatcgcatctctagtttttgttgtttgttaatttcctcaggaaaaacttgacctccttctttcttattacgttggcatctgtcttaagcctttgccttcaattcttatagcttctttcaaattgtattaaatttgaagactaagaaccttcaaaatgactcacatttgaatcctggacctactcctaagctgacctgttctagtttttaaaaatggatgtgaaattttgcttagaatcctagaagttaaaaatgtgacatcctacagaatgccacttcatacaggcaagtctggtgcccttaaagttagttttaccctgagaggaaaacttagaaatgaatacaagttcaagtttgctcaatttcttgttttgcttaaaatttgcctacataacacataaattcatcaaactcctttcctagtgacaatacttcattagattactttagtgagtattcaggagattttcatcttatgagtcataaaattcttttattccccaaagaatttctggtgtctgattggaatttcacgtctttgtagttttagctggactctttgaagcagttacttcctaaatgactgtattcctgaggcctgcatgtaatacctggggagctgggtcacaggttgactcctgtttttcaagaaaattgaaaaatcaatctctttcattgctttagtcttagtaattttattcagaaattttcttaaactttttaacctcctcctgtcatgacagagaggttttcacttgctgcctatacagtttccagcattaatttttttgtgcctacttaggcccgtttctgtctatttctgtgaatacatcccagcgatttaatgttagtatgtttcttgcctttcctgtcaggttttcatcactcgtttggtataaaggaaaaggggatagaattacaaatatactggaccatgtagctatcgatgagaaatgtcttcagatatccttttacttttttcttcttcttctttttttaaagttctttttgaaggaggtgaaagtcaggttatagtggaaagccagaaccattgtgtgttcctatttgaaaaatcctgggaagtgaacatgatactttttgacatgcgagtttcagaaattcttagtgattattataatacacactccgcttatgtgcagagcttcatctgcatgcacaagtctttgtgtgttttaaaagataatgcctaactcttctgtttataaatggcagtagctgagtatgcacagaagagactgaagtctaagtctggatgtgctatttggctacattcaaacagcatgggacaaacacaaaatgtaaggctagtagaatattgacactaacaaattattcggaagttggttattaggaaatctttcactggacttcagtatctttggtttctttaagaacaaatctaaaattttaccccaaaagctaggtagttatatattatttgtattatggctccttcaacacataacttttttaaacttttaaatcaataaaagaagggattctgtctataaaacacaaaggaatacaccaagttaatgttttagttgattagtatattattttgagagtagaaaaaaatcaatgcaaaattacttgctattcacatatatgcagaaaatgtaagtccttggaatgtagcacacattatcattacataatctatatccatatgctgtttataacaagctgaaatgttatacccttgagaaaagaaccagattctggcacaggactgttttgtggcaaggaaagatgaatggattccaaaattttaaaaggggggaaaagcttgatggttccacaaaaaataagagttgaaatggggatttagagatatatatgttaacacaagctgacaattaaagcaattaatttccttctttatctatatcccctcctagctcttctaatcctgactaaggtaaatggattgactcacctttttagcagatgaagataggaacaaagatatctggcattacagcctgtctccccatcccccgccatccccatttgtagcttttttttttacagatgtttttttccattagttagaatagttagttcttaaagcagttagagacagatctgtaccagtcagagaagcagtggttcaagcctgttggcttaattgctttgagtatgttgctaatgatgctggggccacatgttagatagccaatgtgagcgtttttatgcagtggaaaaggtctttctccagacaaatattgtacctctaatccttttatgagtaaatctgagataaagggatttgtgaatttgtcagtgactcattaaaaatatattctgagtcccttaggatagctattattaaaaaacaacaaaataataagtgttggagaggatgtagaaaaattggaatcttatactagtgggaatgtaaaatggtacacttaatgtgaaaacaatatgtcagttcctcaaaaaattaaacatagaattaccatataatccagcaattccacttgtagttatatatccaaaagaattgaaagcagagactcaaacaagtattttttctccagtgtttatagcagcattattcatagtagccaaaaggtatttttttccttgactcttttcattttagtttcttctgttacaaatttatctttctttaaaatttcttatggagtcatattctgttaaaattttctttagagtgtgaagtatttgtggtttgatttcttttctgttttctgggataaaacttccagaaaaaaacttcatcttttttctccaagttcctcttagaattaaaaaaaaatttttttaattgtccatggtattcagtgcaaccacaattttctaatgtcaaatttcagtagttcttctggtctcagtcttctgcagtacctcacaccatcatgcacagaatggtgtgagggagatactttacaccatggcccacagacctgggaattatcactctggcctttctgaatttcatcaccctcctgcttcactgtgatggtctttctccaaggttgttgtatgatattgatagctttcctagctttcaggactgagaaaatatttgtcttttcaaaaattcattttgtttcatttagtttctgcttagggaaatctttaagtctctacactgctcccttccccagggttgctatttgggtttatattttgcatgtctccaagattctctcttagcttcctatcctgcagcccaataagagacgacccattccacttgtatatctctggtgcctcactagatgtggcagttcaggttttctgaaccacctgatctgcagggagtacttgatctcttcctttattttcaaagatcttggcatattcttttgaaatcctcagtggtggagagtctttgcactttgaggtgcttacttttctaagtgtgaacaaattacccttgcagcagtcttttctggaatcttttggcttaagggctcctcatttagtgtatggggtccgtcctttctccattttttctttttttgaaaattagacaagtagaatcttactgtctgctttgtatccacacctaggagctagacctacacatctatgtctacatttcatttcaagttcttgactcaaccccctaatttcagtccagctcctttggaattggcattcctcctttgatccttctgccccaactctggtgtctgtctcctataggatttggctgagatctgcccgtctacctctgttctagaatatcctttagatcactttgtccacccagggtgcaggcagtttaatatctagttgagaagataagtctaacatggtaagacaacagacaataatatgaactatcaccaagtaagttttattgtataataggtgttgataggtgtcatagccattcagaaatagtgaagaatatttatggaaagcttcagtgaacagatgggacttgaaaaagatattaataagcgttgggacttggagttgtaaaaattccagtccagtgaaggaacatgaatgacggaagaaggtgggaaggagcttggcatatggatgcaacaatgaagatttcctcaaaatactctattttccttccattaatgagatagtaaataggaggctcttaaagattgtttccatctggaggttactatcatgtaaattccttacatttgtgtggtgattagctattttaaatgcactgatataattatatcatttggtctttgtaacagctttgtaaaatcacagatgagtaaatcacatcctaagtatcttgccagaaatttcattgctcatgcatagtagagccgggatcgatttaggcagtgagaatcttgtgtctgggagaccagttagatgttatctacacagaaaatggtgaggctccaagttttgatggtggctgtggaatggagaggaagggatggaaattagaggtagactccacggcacttaatgactaagtggatataggagtaccacatatgtgctttgaatattggtaactgaaagagttgtgatgccataattaagagacaggaacatatatgtaagtcaagtccctgatttgtaatttgaagcccatttcttttgttgtataagaggtggtaaagatctctttctgactcattgcaccttgtttaaaattttttgttgcttttccatcttttggccaagatcaaatctatattttaaaatgtttttcatatgtttcaagactgttttgagtttactctttagtattttctctgccaggctacgtaatcctagttgctagtttatttagccatttctatagggatgtttttaatgctttattatatttgtgattgttttctgaatctttgccagcttctccacgtgtctctctgatgttaaattcagatttggtcataatattttgtcagagctatagtctgagcaatattgattttgaacaaagagtagtacatcaagtttcttaaaatttgtacacctgtttgttcacagcagtataatgttacactacactgatgacccagattcaggttatattttctataaagcactttgaaagattttgataacattttgtggagatttctaggaaagatttgatagacttggaggcaacatttcttctactctgaaaggtaaaggtcttgacattcatttctcataagaaaggaatttatcaaagtagcaataaaagataaggctagagttagtaacccaaggtctgtgaaccctgaagcttggtatatgtatttggattaatttttttctagggagagtccagatattttgtccattttttcaataatagatgtggcatacaattaaactgtatcttccatgctttttccatttaatacatcctacttagaaaagttagatagtgaaaaatgattatattctaggaaaagtcatggtagtacaccccaggtaggaatgagaagtttcaatatagtgtccctggaatattcaggcataggctttagataaggagttcttaacctggggtccttgaattaaacttagaagatccatgaatttcgatgggaaaaaaatccgtattttattttcactaatcacaatttccttgaattatgatatatgttacagataacccacagaagtacctataagtttgtcaccaatagaaaccacaaatgttttcatatcataatacagtcatcacagatatctcaaaataacatttacactaattactacttccaaattatgataattagtagatccaccattaaagcttgttatgtaatgtgttaataaagaagcacatatttactatataacgcatttgttttttttcagtattttgatagcagtatttaaagatcatttttccattgtaatcccatatatttgttctcatgcatttagaaacattttcctgtaggctttgccagacttccaaagggtctggaacaacaataaaaattcaagaaaccctgatttgggtgttatagcatcatttcatcatttctagagttttttaattcactgaacattaagcaattcaggatttcattacataatgttgtttattgagaagaaaatttacaaaaatcattaatcatctggtagaatgtgaacttttctagctttcagaaatgtttctagcttcttactattttatttctgttcatcactagttatattctgtaatagactgtctcaacttgtcaactctctgagctgccacagagattgtttggtgtaggatttagaagaaagaattttggagacaatcttggatttacatgccaacttcacttaacggtgcacagtaaagtggccttgtgaaaggtacataataatctctaaaccccagtttctttacctgtaaaatgggaataaataggatgtgtacacaatatatacgacaataaatgtaaagcacttagcataacatcacaaataataacaataatactcattggagatggtcctgtgtgtggccttatactttctattccagtttttctgaacctcttgagctaaatagtgacagtaattttggtatggacaacttgagtaaagtttttgccccgtggactaaggggccagagagcagtgtcaaaaagcatgatggcaggattttgaatgtgacagatcatggaaggagtttgacttaaggagatttatggacttcaagagtagagatcggcatagccacttctaagtgtactcagccttcttgctcccggagactaagaagcggctaaacatctgagctgcatcactgttcgtgacaggaattttggatacaggaggctttttcttattctttatcctcttattctctcagcaagatctggtagttcatctgtgtctggattttcactacctgtaggactaccagcttttggattatattaataaccaggcctgaacccaagtgagacaaaaaagaaaaataacaacatatctaagtgagtcctgcagtgagacaggatcagtctgaacaaatagacacatatctgataaaacagagtgcctacagtagacagacgacaactaaaccaagaaaaaaaaaagccagctgtcatgacactgtttgcctaatccagttatactcatcccttttgccagggcagaagtgaatattccccaggtgaatgaataataattgatctaagccaatcataaaattccatttcccttgtcagtggttgatttcagttggacagatgctccattcctgatcagttggatctgagagatttttgctagaagttttgctaactaacaaaatgagacacactggctgaagtgctccctttttcactagatgttgttttgtctgcctgtggtgtctggaattactgtagccgttgtgtgaccatgagggggatatcactgacattgtgaggagggcagacattgtccctgatgagataattatgccactgacttgaccaacatggaaccacttaaatatagattccttgttatgtgaaacaataattcctttattgtgtaaggcacttttatttgtgttatttatttcttgcagctgaaaaattctttctgatacaattaagggaattcatgtctagtccccaaaaagtgttttggagatttgaaaagatcatgatttcccacctaaacaattcagtaggtgagttgaaggaagccactgctgagaccaaaatttgttgcctagaagatcaaatggaagaatatctcaaagcacagagcaaaaacacaaagaggtataaatcttgaaagaaaaattaagagacttggaagatagatccaggaggcttaacatgcaaataatcaaaacttttttgggggacctatagaggaactcaagtctacagactgaataggctcactaaattctacataggattaatgaggaaggtaaagcctagcaagatgatactcccgaactttaaggataaacacaaaatcttataaccttccaaatttacaatagaagtgttaggttagcattcagtttctcatctgcaatcctggaaaatagaaagacaacaggataacatctacagataacatctacaggagaggaaggcagagtggaggaaaatgagagttttccaaaggctttattttacttgggtgggaggaaagggaagcagaaaagggaggatatagcatcttgatatggaagacaatgggtctttatggaggaaatggtatctgattttccaataacagcagataattctttgtttgtgagcacacacacacacaaaggaaaatcctgtaataatgggcaagaatggaatgaataggaatttcatctgaatagcagaaaaagggggacaagcacaacataaaatggacaaatataaggaaaaatgaaaggaaaataggtatgtctcttgttaagtcaaatatgaatgaactgaattctcccattacaagacagattgtcagagattgagttaagttctagttatttgctacttacaagaagcaaacaaagtataaagaaagctttatggttaaaacatactaggccaaggcaaacaaaacagaaagcagaaatggcaatattaatatcagacggagtgaaaattaagctaaaaagtacagaggataaaggggaattatatgataataaaaaggtactattcatgaagagtacaaagcaatcataaacctacaggaataaattaacataaataataaatatatgaataagaatcttagaaatgaaagaaaacttgatttaaaaatacatagttacggtggataactttgatctctctctcagattgagacatatgtgtagtcaaactaaataaggatagaggataacccaatagtacaatcaactttttttaatagatgaagtatctttcaaataaaaaacatctttcaaataagaaatataattttgtattctcatggaacattagaagatgatatatcatgtatgtggctacaaggaaaatcttaaattttagaaagtagagatttcgtatagcccatatttttataataatccaatgaaactagagataaatatctaactctatggggtacaataaacattaaacttaaaggaaatgttgtaatcttgaataccttcattattatagaaaaaagatgaaaaataaaggaactttataaaaagaacaataaaaatgctaggaagatgggaataaagataaaagctaaaactaatgaaacagaaaacatcaaacgagtagaaagaataagtgaatccaaagatggttttttgaaagatcaaaaaaatagattaactcataataaacctggttaaagaaaaaaacctagagcagaaatatttatgatatttacaaaaaagaaatacagtggtagatacttgcctttcctgatataagaccagtctgtgaagccaccataataaacttacattggcatagggatagacaaatagattagtagagcagactcgtagacaacagtgtaaacgacagtttataaacatggtatttcaactcaatcaaaaatgaacagtttaaaacttattggtagcccgattggtattctgtttagaagaaaataaaattataatactatagcatatacttagtgaaattcctgattaagatctgaatgcaaaacaaacatcctatatgaaaatataggatactgtatgtataattcagggggaggaactctttttaactaagtctggtagcccagaaaccgcaaaaaaaaggacaggcatatttgaataaaataatcaaaagcaaagtcaaatacagtaacaatagatatagaagaataattataatgcagatgttagtaattaatatctgtaatttacaaagaactgttatcaattaagaagaaaactgttatcaattaagaaaattaagaagaaaacaatttcttcttaattgtgtgaaacagccattacaaataacaatgcataagaatttaataataccttcctgagacttttgtaattttttaaacactaaaaggaagccaaatatcaaaagactatataatgctataatagtgctacagtgctttatgtttgtggatgctgactaaggcttccaaacttttgtgccacccaacagagatttcataggtgcccacagtatactaccaagaaatagtaacctatggattactctggtctagtgacataagtagtaataaatacttgagaggtgatgtttattacaaatatctgaaatatatacattgattgattgtaataacattttcacaatttttgttaatattttcttcagccccaggttggctcacttatttaacaagttatctatttagtgcctactcagtactaaggagctatatcttttgcctgttaatcatttaccatttagtggagtaagacttaaatattactgcccaactgacaaaataatatgtcaaagtgtaggtcatggattatattatgggtatgcttggacctttattgaatttcatttttttttggtaacagaggtccggtggacacattaaatatgactacagtaccatagtgtctttgccaaatttatccgtctgagattcaacactcttcatgtgatgacatctaattttaatgcattttaagcttgtcagtggtcagttttaaagccattgaaaccatcaaattgcaagggctccttgtacctacaggtcttgatgcaggaccccggctctatgaacttagttgtagttctctgaggtgctcctagagctgtcaatatgaggagtggtaagtaggttaccttcaatgaggtttcctggaatgtaggcagttgtttgggatttagagaagactgtcatcaggtgctaaactcttcaacaaatattaataagttacctggagactctgtaactaattcggctacaaagacttgtatctgtgtattttaaaaccaaagctactattgtctttaaattccagatttccagagtaacaggaacgtatatagaaaattcattcaaccaaaatgtatttgaggagtttggaatacactgggaacaaaacaattatctttcccttcctggagcttacattctagctgggaaaataaagacaggagacaaaaagcataataaacagttatgatatattagaaagtgatacatatgtgacaaaatagagcattgggggttggcaaagatttccctaaaggattttaaaaagaaggggtggtaatagagtatgctttggttcgatgaaggttccttcatgccttttcgatgtaatctattaaacaaatttaatatattagggaatgtacagtatttgctaaattgcttcaattttgccatgtatctgcctgccacaaaggcaaaacaccatttgtcatataaacaattctaagtaattattttgtcctaaaatatttgttcttaatagcttttctgagcaatctgttctgtttctaaagatagttgaaaactgtattttcaagaatggttttcagaatttaaattttagtaggtggactaagttttgacatatcataaaaaggtgttgtagatcagtgaatgatcatagaagatttatgaaaacagggaaattcaggtttagcacttaaaatatatataatagaataaagatctaaagcctattcagaagttggagaggtttcagttagagaaaaatgtcaggagaaaatttagataagggaaagaatgttgagacttaactgcccctcagaagtaatcttacattttcatcaggtacatatatttatgagaggaattactctgacatttttgataagtacccaaccaaaaaatgtaagtaatagtttgtcttagagtcccaaataatgctttgtagtgaatagccctaattgagaactgcagttgaatggatcattatttcatttttagtctgaattgcatgttgctgggagtagaatctgtatttctttgaatttccccatcctatatctcacttggtatttttaaggtcagttaagcacagtaaataatctttgctcagcaagcaacccacatcaccatcttcctgtctgatgtagctaataaattctaagcaaacttcaaactccttgtgaagcttcctaatggatgcctcactggactgaagagcttttggaagcaaaataaaataatcatctaaagttgaatgtttttggatcaaggttactaggtcaacactaaatttgaaaccattttgagagacattttttaatggcacttagaaattatggctaaagatcaggctgttacatgtgatgtagctcaggtcctttgatgctaaaggtctacaactgacttctgtgtaagatgtatttttaaaaacattaactgtgatttaaagtagcaagagacagtgttcaggccagggaaaataaaatctccctctccaggtttttggttgaaatggtttgagttcagtaattttattgaacctgaaaaaatattattaatagctgccttcacaaagggaaatagggaagctggcccctgtcaattcctgcttaggagttgccgagacattttgagattgcaagaaaactgtggatgaaatccataccaattagagatcctgtgtgtttggaaccatttaaaaatgttgtgcagggctcaaaggaattagtaaagcttgctgcagtacagctacattattaatctccaaagagaatagataccagatgttcacagtgcccaaggacacctcagtgttcttgacagccttagtcatattgtcctcaaacagattcaaatgcctgaaatgattatgggtgataaggctacaccgtttgtacatctgaacttgttaataattttttgaagaaatgcactatttttgataggcaggaaaagtaaacatgataaatttgatatttgtaaaaaaaatgtctaaagcaaaacagtagaaattctttgcctatttttaaaaatgtttttccacttgacccagtgatagccatattcaggctaagtgattatctttttgtgtgtgcgtgcttaaacaaaataaatttacttcactgagttctggaggctgggaagtccaagatcaaggagctcactgattcagttcccggggagggttctctatcctggcttataggcagtcatcatcattttttttttctgattttttattgtggtgaaatacacataagaaaattagcatgttaactgtttttcagtgtacagttcagtggtatgaaatacattcacattgttgtgcaaccatcaccaccatccaacttcagaactcttttcatcctgtaaaaaggaaactctggacccctaaataataatgctcctttccatcttcccaccatcccctggcaactatcattctactttctgtctctgtaattttgactgctctaagtggaagttattaccttttaattcagtcatatattgtaaatataatgtaaataatgaaatatgtgatattttctttataattcatttaagaaatatttccatgagcttggtgttgaagttgtagtagttaataaagtaatcatggtctcatagtacttagtgaaagaagcaaacattaatcaaaaattacccatataaataaataattgcaaaccatgatacatggcttggaaagaaagtactactgggtgctgcaaacatgtttgacctgggaacctgacctagaattaaagctccagccatattgattgagcacctactttgtgtcaaaaagcaaaacagattacaatggtcatttaaggcattacagccattgactctcagtttggtggaccacaagataattaggaacaacaacaaacaaattaaaaataaaataaaaatcaaaaagattcttgtagtctttcttcaaatatggcttctgttcagtatcctttggagcatttgagtaatgcttaagttttttttaacatgtctaaatatttttatatcactaattttattgcaaaaattccattaggaaagtaatattgtaacatttgaacacttcagaaaacagagaaagatgggatgagtgatagggaccttgattccaaatatcttaaaataaacctcattgtgttcttcctgtagccttccttccctgcaggttgtaaaagagtagtctctgttcactgtcttcttcactatgctttccaatctaatactcattgttgaaatctgcagtgtctctcaggtcttacttaacttgtcctttctctagattatgtgactgctgtctgtcctccatccttaagcaattttctcctttttcagactctgtcctgattcccttgtcctcttcctatttctggaaatgctcttttcttttcctctactgactcttattcttttgcttaacatttaaatacctgcctggttctcctctccgtttatattcatccctcctacatatccttatccaggaccttactgtcttttatgttgtgatgactttccaatctgcatcttgagcttggctctcatttctgagcccacatattcctttgtctcctagatccacaagaaactgattttgttattttctctgtaaaaatgtatctctagcatgattcagctagtcacacaagctggaaacctagtaataatgtgatcctgcccttcttcactgccctgcatgtactgcaatcaccaaaatcagtaaactttgctctcttgattgctctataaactctcccctgcttcccagtcccattaaagcttcattatttctgttccagtacagtctctcatctgatatatacgtttccatgttccctcttatcccgaatccctccagtctgctttcagaaccatttttctaaaatacaaatttgatcatgttactaggctgcttaaaagccttcaggtggcccccaatcatcattttatctagaatgcccctggcagcagtgccaccaccatttacaactactgggttcctggacagctagatgagaaagcaggataactggtaaccaaaataaagttaatttttgaatagtatattgtatttaaattttatttgcatttttatctgcatgaatttttagagtctataggtttatgctaatttcatgtatattgtaaattccctacttttcaagacacatatatataattttttttttttttgagacagagtctcactctgtcgcccaggctggaatgcagtgacacaatcttggctcactgcaactgccacctccaaggttcaagcgattctcccacctcagcctccagggtagctgggactagaggcatgcaccaccatgcccggctaatttctgtatttttagtaaagatgggtttcaccatgttgcccaggctggtctcgaactcctgaccttaggtgatccacctgcctcagcctcccaaagtgctgggattagaggtgtgagccaccatgcccagccaagataaatattttaaatatcatttttatttcaggtacctcttaataaagctgaatgaagcatgggagaatgtttgccaaaactaatgattttctttttgtcatgtttactctttgtctggactgaactagtttgcttcttgagactattgttggtttgaagtaatgaaatcatgtcatcagcatatgggggacacatccttatatttgcaatggcaggagggaagaaatacagaaattctcaaacaatacaaagcaaatataaacttgaaaagtggtctaagaaattcctttccacttaagtaggcaatgaagagaccattctgacctaccaattctaactcagatgccattgcagatgtcataaaagtttgtgttaatctcatacagctaacccataatccgtttttagccacagagttaaatctgagccagttaaagcggctaaaacttacactgattttgatatttttaatcaagatttttaaaatgtaattgtagttagtagaaaaattatgatgcgtcaaatttgttgcttcttcaaatgaaatattagatgaagagactaaagtctgcagtttattaaaaaaaaaatcttgccttcttattcaagatgataaactgagcatacatgtttgtttcccctctctcccaagagatatctttaaaatgagagtaagaaaaagaagaggaggagtaggaggagtaaaagtagaagaaatccattgcaaagagaattggagtggggtagggagcctttagaaaaggaagctcaaagttttcccaagaaaaaaaaaatgggtggaaatgcattaatgggtgtgaccaattaaagaaagttgcagcccaaaatatgtacaagagttgttgccgatgcccagcagaattacaaaaaggctcagaactcagaattgacaagagcaaaatggggacctgacaacgaggtgcttaactgaaagtctaaataacaactagactagttttacattttccttatcttcatatttagaatgacagatcattagttacccacaagaaaacaagcctggaagactgctctcttaagatattaaacagcttgtctgggataattggggttgctattgaggtgttgatattccagagtaaaccattccccattgaggtattcagggaacgccaggatgaagccttgtccatcagcaagtgatgacagcagtcctggagttcccaggcagcttttatattcagaggaaaggcttgctaaggatacaaacccatactacatctaatggcagagaaaacctccatcagatgtgtaggataactgaccttggcctccatgtttaaataggaactgttgatcaaagatccccaaagacagatgaaggaaactaagagcttgaaatttaaaaatcaagataaagagaacaatttcccagaaggagcagagatattttagggaatcatagaaaaactaaaataaaacaactctctagttaatattctcagaaatatttgaaaagatactttgtttataaaataagatgatactgttaccaagaaagccagaggtaagaataatgtgaaaaaataagttgccaaaaaaatacctacaatgcaatgtcatttatataaaattctgaacatttaaaatggtatattttgtttctggatatagacatgtgtagaagattaatcaaaataactgtcggaatggtaggtgagtaattgtctttggagtactaggaggcataagagtagggaacaaggttagaggcagatctgctgtaatcgttagagaaagatggggagaaagaaacctgaagccaatatagaaaacaaggtagtatctgtgaaacctgggcagtgaacatctgttaaattgtggatacctagtccattatttgtatacttttgcatatgcttgaaatgtttgtcattaaaaactcaaaaagtaaaattttgaatacagaagtttgtacagttgtgtaataaagtcataatccaaacaaaaataaaaagaagtgtggcatgccttttaacaagtgttgctgtataaaaaatggaaaatcaatttgattttcggtctcctaggattacttgttgcagtaaggatttggcagaataacacaaataatgtttattagttttcagctcttagaatctatagaaaagcacagaagacttaattatggttggtcactggagtggggcaaaggataggtggagggaagatgagggtgctaaggctgtcttacagagtggggagctgaatggtattatcttaagctactaaatatctacttaagctagatattcatgcattcgatttttcatttatgagatagtttttttggaacaccttttatgtagcaggcacttttttagtttgttgccagtacaatggtaaatgaaacaaactccctgcttttatttttacttacattctagttcaagaggcagacattacccaattaggttttaaagaaattaaaaataacctgagtattaaaagattggaaaggggaatggaggggagattatgtaggtataagtactaaatcttaatctttcataagaagaaatgaatttataatgtctaaaacagcactgtgcaaggatggaaatgttctatgtctgtggaaatcttggtggaaatgttccatatgtatatctgtgctgtctaatatggtcgccattagctacttgtaactgctgagaacttgaaatgtggctagtgtgactgagaaactgtaattttatttaattttaattaattcaaatttaaacaataacatgactgataactactgtattggacagcacaggtttaaaatgaaataatcaagagacagcagcataagcacatttttaaagaaacagaaaatctatttatcatggtttcctgtgggtatggaagaattgacagggaatgtctcattatgagccatcttgtttgattttctaccacatgcccatatttggttgattgccacttaaatttttggaagactatattgcaaccaaatgggtctttgaaggggattaaagaatcattttttaaatgagatagactttatacctgaagcatcagttaagtgaatattttattttattttttgagacggagtcttgctctgttgcccaggctggagtgcagtggtgcgatctcggctcactgcaagctccacttcctgggttcatgccattctcctgcctcagcctcccgagtagctgggactacaggcagcccccaccacgcctggctaatttttttgtattttttttttttttgtagaggcggggtttcattgtattagccaggatggtcttgacctcctgacctcatgatccacccccccagagtgaatattaaataatttggcaagagtcaggactctaagtttcaaacaattcttgttagcagggggactacatagagagttggattatttattttgaattaggtaataaggtaaattgtggtcagtgaggttagcagattccagctacaaataatctgaatactacaaattttgaaatatggccttggaattagagagctgtgaggactgatacacacacaaataaagacctgtacctccagcttgtctcaccaaaactgtgctaaaatatgtatcatcattattgacccatcacccaaacccagtgggattcattgcgttcaaacttactttacatttgaaaataacaaaacatgtgtaattacctttcaattcaataagttctcattcatgagtagtttctgctgggttctgttgatgagtcatgtagctgactagcaaggtttctaatttttattttagggtggggaaggattaggggaagtggaagctgtatagcaattcttgttaaattaagaataggacaatgagggccacattttctagatatggtacagatagaattggcttcaacttgtttacactctgttgctaactttaacaacatgtttcacagatttttttaaagaaggtggaattgattgggatggagagctaagaaagttttacttatgaggcagttggcatgaaacatttagaatttgtcaacagaatactacttgtggagagctatgccattattcaattatgggctcaagtagacttgaaacagatttattaagctacattatgggttggagggggaatgattatttatgctgcaatctaaaaaaaaaatccattctagtgtagatgatatagcaagcaccaaagacgctacaacaactaatctggatcactttctcttatatttgagatgaaaatgagcatattctggagttgcttcacatgacatgagtagtatgacgttatatctgcagatgaatgtggcctgatgggtgaataaaattgaggcagaacagccatatttcaacttgcctgcttcagttgtactacatatatttatttgctatctggagatggtaattctttgaagggtgaaactatttattgaaaataaggcatccttgataataataggctaatatctaaaaagtacagtttatattctttgaaatgaaatgataataggcctaatccaatctcatcaaatagaaactaagggatgtattgggggtggggtgaactgagtctgtttatacaggttttcacatgacttttcttttaaaaagtgcatggaatgcatccaaaacaaataatgttttgttagaagaccaaaaggaaaatcctagagaaaggaggatggatgatctttctttaatgtcaaaactgacataaacacactccccttcccccacccttttactcaagataattttctcaacaagacgcagattgctttagtctctgcctattaccctttgaagcactttccttattattaggagttggggcaaggtttcctttgaggatttttacagcagtgaagagttccttctttaaatactttcacatgatgagggaattccgctttcaaagtgctgtcatcactgtggcttctctgccataaggcagtttattactgggggaaggtccttcttagtttgattgtcattaagtacttacctttctgatgtactctttgtatagaatgtcactttttctgagaagtctagcaaagcaactcagcattctcctttgttaaccttattggccaaagttagccatgattctcttttgaaatgcgttccaccacagtgagttacagtctccagcgtggtttttcgtgtccatctccactaatcaggatttgggttgacatattgaatattccattttgaaaactgccatctcttctacagggcaaagagacattgtgagttttggggagttttgaaatatctttatttatttttatttttatttttgactgtctcttctaatgtttaaataatgccatggtaaacaacaaactattcaagcatcaacagtttcccagaaacactgaaatcttttgagacctgcactctgtttcaacctccctcatcctgctctattcttcaatatagttttctggaaaatcctgtgcatatctaattcaggtagaaaaaaattgaggaagaaagtggaacataagaagagagtcctaaagtcagaatattcatatcctagttttggctttgctacttactgcctgtgtaaccttggcaagtaacttatccttctgttccctcccacccccaaaaccctgtaaaatgagtgaactctatgaacttcatgtttctcctctcctaaatacacaagaagtaaacctctcccccacataaagaggcgtaatcacagtgattgagccacgttggacagtgcagtgagaaactagcattgatatttcctaaattagtctgtaaggagtatgattttattctctctctttcttgtggaactctctgatgtgctgtaattgtttatctcatttgcttatttaaggctaactggaaatcagtttaagaaacatttgagttgtgcctttgtactggacactgtgttaggcaatgagaatactcaggtcaatgaatttagactctgccttcaaggtgttcactaactagtaagggaggaaagcatgaaaataaattacaaatccagggtgatgcctagaacaagataaataaatataagatgcaatgtagcataaaggaaaaatatatacatgtgtatatctatttctccatacctattttgaactctagaaataggactatgtggtgctggggtaaggtagctttatggtaaatttaatacaacaatgaaactcctaaacctgtttactactaaatcaagtgtgtccctcccacaatatcagttgccttaaattgcaattaaatgagttatgcccttgaaggttaaaaaggaaaatacagaatattttctttcttttcatagataaatgactttatttttcaatgtcctcaaatatcaccattaaacctgttttcactagcaattggcacttctattattaacaaagaagaacccctaaatgtgtcaagtaaccattgtaaaccaaatattatagcctagaatatattcaaattctcttcagaatttagaaaatgggaagaaattcattttcttaagaatgctagtatgtctcagcataattaatttttgtgaaaggttatagtctggaagtttaaggttttcctggtgctttgtagcaattttgagctcaaatcaaggaattagaaggtgttaacactcttggtgttaaatctagcactgactatcaatactatactcttgcatcgtggaggatgagggagctttggggatttggcctaatctgttttgtttgaaactaaaaatcatgttgttgaagtttgcattctgttttctttcaataggtgtattaacacaaagcaccaggttcttaacgggcttcttcctttctgcagaagtaaatgtgacttgtgaaaaagaaaaaaaaattgcaccagcacttcagcaacatcgcccctctttcatcattttggggattcaggcttcagctcagtaactccagacatattttggggaaacataaaaacatgcccataagtactgaacataaaacctgactgtacactcaaaacatttgtacaatcctatgatccatttaccatcaagtttcttaaagtgtgcatatatttttaaaatcactagaataaataaaactttgaactagatgctctttgagataaggtgctgcccagagatgtctgaggactgatgctctatgagtctcttatgaagtgaacaagcttcttgcccataaaaatagatagatgctatgatttccagataaccctttttccaggaaattagatgaggatggtgacaacaggatagtcgttttgttaaacaaaattttaactatccaaactaggtactgaaaaagcttgctttctaaggaggcatggaatagttgaaaagttaacagccagaccaattgattgtgttttggaaaacatcgtaatggaagattcatagtgcttcagggccatgctgagtgactctgaagacaagagaaagagtggtgagagagagccttctaagttcaaggatactctagaaaactattggatggtctaagaatgtctcatgaagcaccaaaccctaatgcaactgtaatctgaatatgaggaaagggttaaaaaataactgtactcttgcaaaatatattttccttcagcttttgacctttcttttttcaggttgaaaagttaaacatacactaaggattttcattatttgcttagtatttctttaaaatgcattctaacccaaggctgtgtatctctcctctctgctttgattcttgtgcctgctgtgtcccaggttggccttcattccacgatgtgatcaattctgaggcaatcacattcacagatgacttttcctatgggatgcacagggtggaaacaagctgctctcaggtgagttcatcctttctgaaaacccaatacattgctttcaggactcctggttgtgctaaatatagcaactaaggccaagcgactggtcacaagaaggacagacaagcatgacgaagtttatatgaagtccgatggatgcctatgttcaggtgtttagcaagtctagtggaatgttaaggtcggcatgatagctcaagcctgtaatcccatactttgagagggccaagtggggaggatcacttgaggccagaagttcaagacgagtccgggcaacctagtgagacctcgtctctacagaaaatattttaaaacttagcagggcatggtagcatatgcctgtagttctagctactcaggggggctgaagcaggagaatcactggagcccaggaggtcgaggctgcagtgagctgtgatcatgccactgtagtctagcctgggagacagagcaagaccctgtctcataaattaaataaataaataaataaataaataaataaataaataaaatgtcagttattggcttcaccactattaaacaaaatcattggtaggaaaaatatcatcttcaattggctcagtaaattgaagagtgggctgttcttggggcatatgaagatttcattatgtggctttgaataacctgatattttgataatctccctctccttgcagttctgtgtacccactgttcagtcagaatgcctctactggcagtgatccaaacacaatcaaggaagacctcagaaatggcttttcttaggtgggtgtgaggaaggtggttgaagagaggctgtaggaagtgaaagttcagtggtaggttggctacatgagataaggtaattccttttctgcttctcctgatatacagacatcctcatttccaataatttcctaattagttctgtccatctgctttaaccaaattaatgctggctctaaggaagcaaatgagcatgtgttgaggaggaggcaaaaatagttaatctgacacccacaatcgagagacttgaacttgtgggtattttgtgcttaaacacagagacatagaatctccatctacatggaataagagcagctgcatattctatggaaggcaatcttgttctttcaacctgctttaaataagtgaaatgtaaagtctgcaatattgtggcattgaaagttattgacaccacagggtattttgttggggaatctgttggacatatcagaggtacaggagcatgatcaggcagctgtaatagcaaagtgattgccatatgggcctccctcagcattctttacctgccctttatccatttttctttaaccccctccaccaggcacaaaatgtttagggagtaggtggcatatttactaccaagtagggagggaggttagtttgaacctaaccttctgatgaatttttgtttttattaaaaaaaaaaaaaaaaagactggcaagtctcctgtccttcaagtgtgaggactactctctctcttgaaaattagacttcatattttatctgaatcacattttcagctcactcttgtttctcagagtggagtctctgatggtgatagtggaactttctggtgctgggtttcacccacagagggtctaatgtaattggacaggtttagtgtggggagcagcatttttaaaagctcctctggttagtgctcaccataaccttctgaggtaggtccttttttctctctgttattttacagttgaggaaactgaggcacaaagagagcaattaaacttgggtcagcttatgtggatttaagtggcagagctgagacttgaattggggtactctccagagctctttatggtgcccagatagatagacaggttgaaaagagtcattaaaatttaaaaatctcatgattttccagcagttggcttaatgcgatatagtttggggttttttttgtttttgaaatgggatcttactctgttgccaaggctggagtgtggtggcatgatcttggctcacggcaacctccacccgccgagctcaagcaatcctctcacctcaacctcccaagtagctgggaccataggtacacaccaccacatccagataattttttgtatttttggtagagatagggtttcaccatgttgccccactggtcttgaactcccgagctcaagtgatccacctgcctcagcctcctaaagtgctgggattacaggcatgagccaccgtgcccagcctgcaatttagttttaaattcaattaaatttgattgatgattttataactgtcacaaaaaggtaaactataagtaggatggcttacattaatttgtaacttaggtacacagtatttagtaaacctcttttaagactaatcgttgtttcttttattttctttttcaagctacaaatgctgttacgtgatcgttttaactcgttttcactcagaacccattttcaaacattgaatcttatgaaaactaaatttaaaaggcacagaaaaatgaagcataagatattaactttacttatggccctactttctaacctctttgtgacaaattcttataattcactgttggaataagcttctttctttctctgtgccagtcacatagataacatcagtagtagtctaggaaagatcattatgaagatgtcctacagtgaccaaagagaaatgaaacccacaaacaatgccaaaattaggcaacattcctaaaagaagtcaggctaaaccaagcatagctgttggcccctcagttaaagcccaaggtgactgttcctgttctttcctaacagttgtgtgatgaaccaacactgacctgctcccttttggcttctttttccacagccttcacttttcatatttagaaagtgtttgactctttcttaaatagaactcttaaatttaaagaaaagagggagaggaatttgttccgctaaggcatgtatgaaaatacacgctttggagtaaagtaagttctatgcaggagagaatgaggttccagcactaacgaatggtatgtgtgccacacccttgcccttgtggatggaggagggggtgtctgccacctaagcacaaaaacagcgtactgaattcaagtggactgggtatctttcatttcaatttctctgtcttttatttgtgtgttccattcacgtttattttccttttgttttataattttctttctttttttaaaattttcctttttctcaggcatctttttttaccttgacttgataaaataaaagatttagtagttcccatgctagagcagtcacttgtattttacttcctagtttctcatttttagcactattttttcattatctgtttatcttcttttaccttacagtttttcagttcatgtagtctcttcttctgctcagaacttctcccgtttattttattttattttattattttttattatgctttaagttctgggaaacatgtgcagaacgtgcaggtttgttacataggtatacacgtgccatggtggtttgctgcacccatcaacccatcatctgcattaggtatttctcctaatgctatccctcccctagcccccaatcacctgacaggtcctggtgtgtgatgttcccctccctgtgtccatgtgttctcattgttccactcccacttatgagtgagaacatgtggtgtttggttttctgttcctgtgttagtttgctgagaatgatggtttccagcttcatccatgtccctgcaaaggacatgaactcatccttttttatggctgcatagtattccatggtgtaattgacaaatggaatctaattaaactaaagagcttttgcacaacaaaagaaactatcatcagactaaacaggcaacctacagaatgagagaaaatttttgcaatctatccatctgacaaatggctaatatccagaatctacaaagaaattaaacaaatttacaagaaaaaaaaaaacaaacccatcaaaaagtgggtgaaggatatgaacagacacttctcaaaagaagacatttatgcagccagcttctcccattttttaagagttttattttattattattattattattttgctggtgagataatgtgggaaactattctggtttgctctctttctaaaattcttgttgtattcttaatttacgtggcttgtcttttctctggactgagttgcctcaatatggtttgtgttataaaaaatctattagatgcttttagtgtgttgtagacattttcagtcggatgtgttatgtggtgtatttctttccttttggtaaagatggaatatctaaatacgaagaacctttaactgccaacttctacaaatgaactgagccttcatggacaaaacctgaatcaactcaacctgatcagcagtttggcaatatggcaatatttcattgttcttttggttcctacctaattctcacttcagtgcttaggatccttttttaaaaaaaattgtggtagggatgacaccatgcatacagtgaattaggcctcatatttgcataggaattgtagactcattgggagccaatagcctaccaccgctttacagtacattgtaaagaggtttgtccatgtgtccagtgacttctcagataatgtttttagtaaagatttactgagagagttcagattggttcagtcctatcaccactttttctagaagtgttgcagtgaggttcttctaaaagaattgttgtgtaggaaacagcacactgcctaatctttgcattgacagcactgaaaacaagcaagggtcggagagattcttcactgtcttcattataattgttgcttatgggtaccctgttatattctgatttctgttgcaattttacttgttctcttttgttattccacctactgaattgaggaattacatttcagttatctcttccaaagaggatcttcatcttaaatttactcgctttggtgggcacatgtattttccctccagctgcagccatcttgtaacaattttcagctataaagaattttccttgatttaatttatattttcaactagtgataaaatacattgcttctattccagtttcactgactactatgaataattattcaacagcctctccctaatcctccaaccccagcctgttaagcaacgctttgtcaggagtttaaattcagtgcaaagaagtaagatttccacagtttaacctgcagttcagtgaagtaagttccttctagaatacttggggaattcttccttcttcagatcaaaatcctccagctggagcaaatgggagactaataaatcacttaactttttgtaatatttttttaaggaaaccatcagatctctgaatttacccacgttggagtctatttatgagtgctgctattactgcttgagtctatggtatagtcccttaagtttgtttaagatcattattaatttgttctaagtcagccaaatcaacagaaaggtaaatatgcaccaatagaaagtatttttcaaaagttaagcagtttttggtaaaaaccccaaaccttattaatcttctacagatgacaactcacatattgctgatgattaaagatacacatgtgttacaatagggcttcagactcacagcccatctctctttttcttgatctttcagtaaaatcataatgctaaactggtgacttcacagtcatttccttggcaaaagattaatatcacaagcacagaggaaaaaaagcccccacttacacacaagtgtcttcaataacagtgggagaaaacagaatactactggcaaagtaaattgcttttcttcttaaaacttttcccatcctgccccatgtgtccaagtgtaaaagccctgctttgaaaatgcttcatttcatagatcaaacacttaagagaaaatgacaataataaagcccaaacatcctaggaatagctaggagaaaaacctctaagacagtgggaaatacatcagtgcagaaaaatgtaactgtgttgaatacactatttgtgtttcttatgtatacaattgagaactgcagtcagattttaaggaattatgttaaacttgatgctcaaacacttattttagggggtcctttcccttggttctctgcaggttctttagctgccagcttttctgagtgggaggcttaggtgataaaggattgttgtgagaattcaaattttttcttttgaacaatcatctgatgctcttcagaatgaagaccagtatattcaggtacatttacctgtgaaataaagaaacacataaccattaaaaacaacattcaaaatgcacactaaagattctatcctgaaataaatcattaacagcaggtctcagagatttcttcatcgagcaaccagtttgtttcagttacaaccaggtgtactgagaaaccccaacacattgccagttggctggggcctgggaggcagagcttgcaggcagctaaagaaacaatgctcctctggcaacttccatttatcctcccagctttcccaaggctagaagctgcaaagaatgggctccgtgcgcgtactctcagggaggagccttcaaggcttgtgcgcttttcaaagaaaccgggtaacagtcctttctgggagactaggtttacctgggaggaggctcgaatggcactgcgtggttaggcttccctcagacaaatggctttgccggcagtggggcggggatgtatgtggtgccacagatacagatgaacacctttctatgttttgagatgatgctcttcccttagtaacctaaggctgctatgactcttccagaacaccctgtggcaagtataatgaagccataactatcattttcaggggactcaaaccgtttctgaggatttttctacccccatcctcaacccatatatttgttagcaaatagttttcatagtctttttctaactataatttctcttcctcactttttttttttttttttgccttggattagggacacacctagaatcagtgttttcctttctatttaaccagaatactagtaccagattagcaaatgaaactacaggttgaaaactcacccagttcaacagattcaattactgtaatttggatttttaaaatatgatttgggaaattaagaccatataactcattcttaaacaccttcaaatatatcctcactatgctttatttttggtgtagaataaatagaaatattttctaaagatgctcaagagattattagcaaaggcaatatcatttatttttcccagatagctgcattctctcattaaacacacacacacacacccctaaggcttttaggtatatgaaaacttcatctcttaaatgccaagtgatccaagtgctggagctgcatctgagatcagtaattgtgcacacacactggtcactgagagcactggttcctgttggacagcaccttgactattttggtaggcagaaatgggtgtttcctgtgtccgttgggcaagcatatgtatttttactggttcatcttagctgtggatgcctaaaaatttggcatcaattgtttatagaaaggaaaagcagtctgacctgtcagccttgatattacctaaacctgcatcgaatgtggtaaaataatacaagatttgttttttaggcctgtttcatattttctaggcaatagatcaaatcagttcagggttcatttttagctctttaataaactgacagagtttgctggcagtgaaatgagaatgcacttttaacatggaagtgccatacagtcaaagttgctatttctgctatttattaataactagggaatacttgagaattgagcttagcatgttcaacagggaaactaagattctagtgcttttcattgtaatgagcactttctctcatttttctctcttcatctccatttggtgtctcatccccagtcccttgtgaattcatactctttccttgaaacttataagtgttttatacaccaaatcagcacagtgagaattaacaaatcattgatatgctttttctctcatactcttacctaaatcttgactcttccctcttctcgaaatgccctcccctagagatacacttcttccaggtccttattccaaagtcaccccaggtaggcctcttctgaccaccctatctaacatttcatatcaccttccttttttgctcccttagcattgctttctaccttccatgctttatagttcacttgttttcttgtgtactgtctgtctctcccactagaatgtaagctctatgaggccagggattgttgcctgtactccagagtctaaaacagtgcctggcatatagcaggcactccattaataaacgaatgaatggaagtcatttaccccaggctttggtttctttgatccatgataaatgatggattttcacagcctgcttgaatatggtgcaccagtgtctccatctcgttcgccccatccctgatggaaaagggcagtagatatctaagtgtgacatgtaccttcatctcctggagctgtacccagcatcaacgcagttagtgtaggggtgttcactgagccagcctttttggagaaactttctctgggctttatttctctcaaacaccaacatgatgttccttctgcctctgtctagaccttaggtctcttcttccccagctttttgaatagtcagtaaaattgattttagctaaacagcttattgcttttctttatattagagttcatttggataaagaagccagcatgacactacttgttggaagccaggaaaaaaacaattgtgtgtgctagagatgtttccttttgctacatttgcagccctggtgactgtgacataaatctattgagccttgccattgcttcgctgggttccaagaacatccaatacttgtctgatgttaagttttactgcccatgaaagcaaacatcacctctgtcatggccagttaaacagtatcttttcagtggacttctgcatatctgaaacccacccatccaaagccaaaagtaatgccgggggaaagattttatgctgccatgtttcttacaagggaagatcaagggtcaacttgattcataaaattactgcagtcatttttcagctggctgagagacttcacagatcaaaaaatacgtggctcctaaatgatttctgatatgcacaattctagtgttttttgttctcagcatgtggcgcaaagcctgccagaaaccatctttgcggctattgacaggcggattagaaatcatccacgatggtttccttcatttctctacaggctggtcatccatttaaactgcttaatgtgaattcctctcaaagcctgctttgtacatgcttttccctgacgttttgttcttctctttcagtgtggtgctcaccttgggcacatttttgatgatgggcctcgtccaactgggaaaagatactgcataaattcggctgccttgtcttttacacctgcggatagcagtggcaccgccgagggaggcagtggggtcgccagcccggcccaggcagacaaagcggagctctagagtaatggagagtgatggaaacaaagtgtacttaatgcacagcttattaaaaaaatcaaaattgttatcttaatagatatattttttcaaaaactataagggcagttttgtgctattgatattttttcttcttttgcttaaacagaagccctggccatccatgtattttgcaattgactagatcaagaactgtttatagctttagcaaatggagacagctttgtgaaacttcttcacaagccacttataccctttggcattcttttctttgagcacatggcttcttttgcagtttttccccctttgattcagaagcagagggttcatggtcttcaaacatgaaaatagagatctcctctgcagtgtagagaccagagctgggcagtgcagggcatggagacctgcaagacacatggccttgaggcctttgcacagacccacctaagataaggttggagtgatgttttaatgagactgttcagctttgtggaaagtttgagctaaggtcatttttttttttctcactgaaagggtgtgaaggtctaaagtctttccttatgttaaattgttgccagatccaaaggggcatactgagtgttgtggcagagaagtaaacattaccacactgttaggcctttattttattttattttccatcgaaagcattggaggcccagtgcaatggctcacgcctgtgatcccagcactttgggaggccaaggcgggtggatcacgaggtcaggagatggagaccatcctggctaacatggtgaaaccccgtctctactaaaaatacgaaaaattagccaggcgtggtggtgggcacctgtagtcccagctactcaggaggctgaggcaggagaatggcgtgaacccggaaggcggagcttgcagttagccgagatcatgccactgcactccagcctacatgacaatgtgacactccatctcaaaaaataataataataacaatataagaactagctgggcatggtggcgcatgcatgtagtcccagctactcctgaggctcagtcaggagaatcgcttgaacttgggaggcggaggttgcagtgagctgagctcataccactgcactccagcctgaacagagtgagatcctgtcaaaaaagaaaagaaaaagaaagcagcattcaaatgtaagacaactgtaaaatattgagccccacttggtctaaaattcaaaaagaagaacgcctgtccatcgcctttttataagtccttctctccacacctaaaagcagctgcagctggaagggcacaaattccactgtgtaaaataaaatattaggggcaacacacttcatcaaggcagcaggaatgagagagagcagagaagatcaaggatgaagtcttgggtactgaaaaattcagtgctgggcagaaaaactgacagggcagtacaagtaacaaacagaatccaagtggggtggcccttgtgcacagagctccaggtgacctctggagagacatgggcattcacatggaaagctaaaacggaagctcaagtttcatactcaacataatcttctgtgtgacaaaggacaagccatgtagcctctctgtgcctatttcttcatgcataaactgggactcataatatttgtaaaatgtattgatactctcagggcaaattcactatattgctatacagttgagatcagtgttgtaaaattaaactgatctggttctaattgcctcaaaggccaaagcccaggcatttgaaatggaaagaagcagagaggaggctgacttagctgattggtatggaaacagttgggccaagagccagaatttccctttgtagcaacacggctagttttactttgagaagctctgctcagctgctttataacattaagtctggcggaatggatgtcactgtgcacaataaagttttcacaagtataaacaatggtgatgtaagtcaacattgctgtagccaggtgtgaaggttgtatggtgtgtgacgaatgtacatcatgtttgtaggtttggatgctaatcttgaattgtagtttaaaaaatacgtatttttgtaactctttgaaagtttatgaagactgacagctttccttgtaagcactaagagaaaaaaaagaaagagggacatttgacaattttaaagaaacaacaagaaattagaatgaaaatctgtgacaaacagcgtcagtgtggccatgtccacattcctacatgtctctctctacaagcacctctctaagaagcctgacatcccggtggactctttatagtcatgtacacttgattccagatgagctctggtcttatctggatgctcagataagaggtttctatctgagcatccagatgttccctcaggttccaagacatttcaccccaggccctgggttcactctggaattcgtaggcttcacgtctctctagaaatgacgtgtaaaatttaagaccagacctcagccatcagcgtccagaccatcctagaagtctttcccaatctcacagagaaagccctagtatttcccagtgaccccaggattccacgttggggtggccaaagaaataggtctctcagggctttgccacagcctccagcccatccttcagaggcacacacagcacctctcggctgctccagctctgtaggatagcctcccctggggtccgtgggacgcgggccacagtgttgaggtagacaaggaggatcagtgagaggcctcttccctctccacagagactggattgtcattgttccttcatttatatcgtagggcttaacatttcactcaaaaaaaagcccctctttttctaatccttagtctttgtttcaaggaaagccagtttttcttctaccacattttccaggatcgactttaagaaaaatgcaacatctattgaaaaaaagtggggtgtatgcatgtggtttaattccagattgcttttgggtttaagtggtatcaaatttcagtatatttctgtcttatgtgaaagaaatatattactaaaacgtcagtgagcaataatgtcagctgtcaagcactagatttatttttgcaggatatggagtgcaatgaactgagtcaatatggcaaggtgtatgtgatctgtgggagttatgccatttaacataggaagtgcatgggactttccctctctgcactccagctcttactgtaccattagaagatgcagaattctgttggtgtgcaaaaagtatagccttacattcaagcagaatggatctgaagaaagcagcaatatctgttactagagaacattcccatgtgtttaaactcttcacttcttagatgcatttaaattcttaatgcaaatgacgtagcaatttgaaaacttctccgtattacttgtgtttaaaatgtcttgctttaaatacaaaacaaatggtaaaggggattatcttttgtttagatggttaaatattatttttgccttagatagctttgtaataatttttctccagacagttcaacacttttgaaaaatgacatgaattttcattaaaaacccttttcctatgtttattgtatacaagaattatgcaataaaatttctttataaaaatattttcttctttgattcctgaagactccttttattttcagcacagatacatggactggagtttgtagcagactgttctgtttgcctccttaaccagctgacaagtctgtagtctatatggagagcctttcatctgatgcagtctttggaagttgggtctcttacagtagggtcaagtccaactctccacaccacaggccctgggagaggcctccagggatctgaaagactggaggaaagggaaacatttgcagaattactcaaccttcacctcacctcagcaaaatcttcagcagcttgtgtatgtttcttgcttaaaatatggatttgggagttccaccataaaactctgtgggtaaaaatgcaggaatgataccacgctgatgccttggcttctgttaaaaaatttgacaggaaacttacactatcattgagggttgttctctgtggaagtatattaggagctttccactgcttacagatgatttcactgataaaagccatctctacagataagttttggtattgtattatttgttgttgaaatgttgagttgttttgtattgttgatttatttactttaggaggcagaagtgggatgatgaagacttttgttcttcagccaattctttaagtcatactcctggtatcttaaaattcacaggccagcaactttatgtagtataccttagagcactgcttttcatagtgtagtcctcagacactgaggtatcagcatcacctgggaacttgccagaaatacaagttaatcaaaagttctgggctggggccttagcaatctgcattttagaaagccctccatgtgattcttgtgcttaaccactgccttggaacttttagtgagaaaacttcaattagtattaattttaaaagcatttatatctgaccctcgaaaacgacttttttttcatcagtccttttctttctataggggtgggtggatagtttttccaaaatgtcatgccttgtagcgcttctcgtccctcactgcccatttgtcttgtccaggaggactagtctgtcctcattcactagcaccactttaattcctattagcatttctggactgagcctgggctgcccagtggtgcttcccagtgcctttctagaccacaggatgtccatggcagggttcatcacagtaattccaagaattagagagcagacttcagtgtataaatttacatatcacctttctcatctcttctattttcttatacttcctttcaaaattatcatcattttttttaaccatttaagatatttcttcaaaggtgccatgtacccaaatcttcaactctttctttttgtcagaaaactgctgttacctagatcttaacaacaaaacgacttttggaagatactgacattcgaaaaaggttgaatttaaaaactgtgtttgggacaagcttactagcaccccatacaggtttcaaaccagagctcatggttctttacacagcagattgaaatttcaccatattttgatgattttttacctgaaaaagccctctgccatagaagaatattctggcaagaatgcttcccatacacttactcccaagaggtcagtcttgtgggccagtctaggaggaattggcccaaaaatgactgtaagctctgaatgaggcagctctgacaccccttgcccaaaacacctgaaaggctgtcctgtgggtgtaaagagcttttatggaaccatcatgaaataaaaccatggtgacctgaaatttggtagccaaatcagattcctagcccacatgagattttcctaatttttagttgattacaaaaccataccaacttgtcagattatgaatgccagggagttagtttctttctttctttctctatttttttttttttttttggagtctcactgctctgttgcccaggctggagtgcagtggcatgatctcagctcactgcaacctctgcttcccaggttgaagcgatcctcccacctcagcctcctgagtagctgggattacaggtgggcaccaccatacctggctaatttttgtatttttagtagagatggggtttcaccatcttggccaggctggtcttgaacccctgaccttatgtgatctattcacctcgccctcccacagtgctaagattacaggtgtgagccaccatgcccagccaaggagcctcattcttatttcaaggttttcaacgctcctccctgcagtgtctaccctgctattcccagtaagcatatactcactcacccttattatcatggaaccagacaaattttctggaataagcagaagggaaagtcagtcagaaattaataagtgcttagttcagcacagccccgacatgggcaaggtatagaagcgtaaataactagaaagcaaagtaaaagaggttttatgtataaatacagcccaggagagagtcataattgttaagttgcagttgcctgaactttattcccatggccttcaatcccaccacaggatttctttttaccttaatgatactgtggattgaataacctctgtcaataagtcaggcacttgatccattatttctactgtgaggtaggtagtcttatcctcattttacagatgatagtgctaacagctcaaaaaattaagacaaattacatagctagtccatggccaagctaaaattgaaatccaagttcctgtgacttcaaacactgagcccctagctccactctgggctgcctcccatgtaggacactggctacttggatagtgttcagctgtggtgggtttgaacctgggggaaaaatgtatatagcatttcttatttgtttcaagttaactgcaattcacacttccgaaacacattctgcattgtgactgtgttatttcagagaggcctaattaagccttcgtacgtcttgattttcttacactttggtgacagaaagtttcatatttttcttcaaagggctaactttaacactcctaataattcttttttttttaattaaaacaatttttttacttcaatagcttttggggtaccagtggtttttgctaacacggatgaattctatggtggcaaattctcagattttagtgcatccatcacccaagtaacactcctaagaattttaactaccacagcaaaaaaagtcctattctggattcatatagaaaaaagaaagaatagaggtgatactaaagatgcatttaaccaaaatattcagtttctggcatagctgatccagctcatcctttctcatccaaaaagatataaagcccaggtggtgggggtggggtggctttaccaatgtcactaagtcagagtctaccatgggagggtgaagaaggaggacaggttcgtgagggctctcaccacactcagagcatgtctgcaggacacatgatggacctatcccaggaactgatggaataaagaggtttgtttctgtttgattacaattcatgacagattgataactgcagaggcattcaaacttggggttttaccccccttctctttaacaccagagcttataaggctattcaggcatctggtgtttgttagacggctgtgttgcatcatccttatgattgctggggaacatctcctagcattcgaacgattggaggaaagactatggggcacaaaatggcctcatccggtttacatctttattactggcttctcgcatacctgcttacatctggaaaaaatctccaggtaaacctcttgggctctttctctaaagagtaactgtaattattagggctatacccgaattcagcttagaataggtatgtcgctgaacttcagccaaaaccctgtgcctgtctaaaagagattttctttttttacatccaattacataggaggggccttttgcccacacatggccagtggggttcctgattctttatgcccaaggcttctatttatgcccttagggaaaagacagggaaactttagggaagaaacagagatctcttcaaatctcctcagtgttttttcctcactaccaaatcccagaattctaatatggattgcagatcatgtcaaaattttacaaatgctaaatctttaccctgctaggtactatcacaaactttaccttactaaccaacagcatcaaaacaaaacaaagaacaacaacaataaaaattacaaacaaagccaactaccatctctgtttccagcctatccctctagtatatggagttcatccattcagcatgatttattgagcacgtactagggtaccaggtaccatgcttggcacaggaaaccccaaactgaataagactccctgcgtcatgcaattagctggaaaaacagacctgcagctaattatgcataatactggcatgttgcatagggttatgcagaagtgtgaataaaatgtaatgaaaactcaactgggagaaggatgaattatcctcccctagaaaagggatgaagcagggagagtggcagtcaaggaacttcacttagagatgaaagtgcagctgggtcttgaaaactacgtagtctttcacataggagagacgaaaacaaggtggttcagagaaacaattggggtgtgatctgtaactttttcaaacacatttctgattattttgataagtagttgttgtctaagatcatctcataagatgcttttttccatttgcttcccccctctccttttaagacatatatatatatatatgtgtcttaaaacatgtatgtatatatatccaggcacacttcatcttactgtgcttcactttattgtgatccacatatagtgcattttttacaaattaaaggtttacggccaccctgcattaagcaagtttttggtgccatttttccagcagcatgtgctcacttcatgtctctgtgtcacattttggtgattcttgctatatttcaaactttttagtgtttattattacatctgttatggcaatctgtgatttagtaatctttgatcttactctcataattgttttggggcaccaccaactgagtctatataaatggcaaacttaataaatgttgtatgttttctgactgctccaataacaagtcatttctctgtccctctccctctccttgtgcctccctatttcttgagacacaacaatattgaaattaggccaatgaataaccctacaatgccctctaggtgtccaagtgaaaggaagagtcacatgtctctcactttaaatcaaaagctagaaatgattaagtttagtgaggaaggcaggtcgaaagccaagacaggcttaaagctagttcacttgcaccaaacagttaaccaagttgtgaatgcaaagaaaaagttcttgtaggaaattaaaagtgctactccagggaatgcatgaatgataagaaagcaaaacagctttattgctgatacagagaaagtttgagtcatctagatagaagatcaaaccagccacaacatttctttaagccaaagcctaatccagagcaagaccctgactctcttcaattatattaaggctgaaagaggtgaagaagccacaaaagaaaagttcgaagctagcaaagggtagttcataaggtttgagtgccaggtgtaatataatagtgctataatgtaaaaatgcaaggtgaagctgcaagtgctgatggggaagctgcaagttatccagatgatccagccaagggaattaatgaaagtggctacaccaaaaaagactttcagtgtaaatgaaacagccttctattggaagatgatgctacctaggattttcatcactagagaggagaagtgaatgcctggcttcaaagcttcaaaggacaggctgactttcttgttagggtctactgtagccggtggctttaagttgaagccagtgcttatttatcattctgaaaatcctaggaccctgaagaattatgctgaaactactctgcctgttttccataaatgaaacaacaaagcctggataacagcatatctctttacatcatggtttacagagtattttaagcctgcagttgaaatctactactcagaaaaatgatcctttcaaaatagttctgcttactgacaatgtacctggttacccaagagctctgatggagatatacaaggagatgaatgttgttttcatgcctactaatacaacatccactctgaagcccgtggatcaaagagtaattttttaagtctttttatttaagaaatacattttgtagggctatagctgacatagacggtgagtcctctggtggatctgggcaaagtaaattgaaaaccttctggaaaggattcaccatttgagatgccattaagaatattcatgactcatgagagaaagttaaaatgtcaacattaacaagaatttgaaagaagttcatttcaaccttcatggatgattttaaggggttcaagactttagtggaggaagtaactgcagattacggtggtggtggaaatagcaagagaactagaattagaagtgaagtctgaagatgtgactgaattgctacaatctcatgataaagcttgaacagaggaggagttgcttcttacaaatgacaaagaaagtgattttttgttgttgttgtttgtttgtttgttttttgagacaggctcttgctatgttgcctaggttggtctcaaacttctgggctcaagctaccctcccatcttgcctcccaaagggctgggattacaggcctgatctactgcatccagcgcgaaaagtggtttcttgagatggcatctactcccagggatgaggctgtgaacattattgaaattacaatataggatttagaacattacataaacttttacaaggaattacatagataggaaaaagagcaaaaattaaaaatactaaaatgacaccaacaacaaaagaatattatataaacttagttgataaagcagcagtgggatttgagagtactaactccagttttgaaagaagttgtactatgagtaaaatgctatcaaacagcatcgcatgctacagagaaattgttcatgaaaggaggagtcaatcaatgcagcaaacttcaccactgtcttattttcagaaattgccatggctactcccacctttagctacgaccaccccggtcagtcagcagccatcaacattgaggtaagatcctccatcagcaaaaaaaattatgactcattgaaggctcagatgatcattagcattttttagcaataaagtatttttaagtaaggtttgtacgatgtttagacataatgctattgtaggcttactagactacacaatagtataaaaataacttttatatgtactgggaagccaaaaaatttgtgtgacttgctttactgaaatatttacttccttgccatgatctgtaactgaacacatagcatatcttcaaggtatgcctgtatgtatgtatgtgtgtgtatacatacatgtatgtgtatatatatatgtatgtgtgtttgtctatggacacctatacatatatacacacacatacatacatacatacatacaagcataccttgtatgtatatatacagagagagacaaccaaaggaagaggaggaggaggaggaacttagggagaggcttccgtgccatttcttccatttttgcatcccacatctaagaagaaagcagactctgtaaggtccttcgtacctgcttatacctctgttctactccctcttctcagggcagactatcatgagcttatctggacctctgcagcattgccaaactggcttcctgtctctgtgctctctcccctcctcccagccgccacaatgaagccagtgaccttttgaaattataaatctgggcacctggcatccactgtaggacgtggtgcagacaaactgtagttgagtctacagaggcccttcacagtctggctacaacctgtctgtcctggctcctctctcaccacttcttcctcactgaagactcttactacgcacagaaggtggcacatccttttatataatgctttctgcctgaaatgtccttttgccttttttgattcataggcttcaaggatccctcaaatccagactccaatagcatctctttcatgccgtatattgccaatttcctttccttctctggcgtaaatgtacagtcacgtgatgcacaataacatttcagtcaatgacggacctcatatgtgaccatagtcccttaagattataatggagctgaaaaattcccattgcctattgatgttgtagtagttatagcacagcacgttacttttctatgtttaggtatgttgtgatacaaaaataccactgtgtcacaattgcctgcagtattcagtacagtaacatgctgaacaggcttgtagcctaggagcaatgagttatactaaatagcctaggtgtgcagtaggctataccatctaggtttgttgagtatactctatcatgtttgcacaacaacaaaatcacctaacacatttctcagaatgtatcatcattaagtgactgtattcccactctcacttgttcaggtcttgattctagagttcatcacttcgaataattgtctccctcaccagatttggagctcctgttgaggaaaaacactttgaataaatcaatatctggaacaaaaggtaattagaatccattctaagcaaaatagctggtgaaattcattttcacttctcttttctctcattttctttgccttatcctatcctttcttgtaataccccatgtagatctgttctctgagcaatgcgcagagaactagaagcttaatctgctagaaaatagctaccacctacccccagcgtttattaaaggctagacccatactaacattcatgatctcatttagtcttctgggcaacacagaagtcacagaccggaggtttaatgcaagctttctttgcctgaatcttcttaaaaacatatgtttaaaaatagatttaaagggtacaagggtagttttgttacttggatatattgcatagtggcaaagtctgggtttttagtgtaaacgtcatctatagtgtccatcgtgccccacaggtaatttctcatccctcacctgcctctcaccctcccacatgcctgagtctgcagcatctattactccattctctatgttcacgtgtacacattgtttagctcccacttataagtgagagcatgtgatatttgactttctgttagtacatctttttgccaatatttaaaaaccaggagatctcacatcaaaaccccacttttttgattatttggaatacagagggaatctggcagttctgggcagcttccaggtagtgccaagtggcagctgcacacttgaggtgaggatgacatttccattttgccacaagccttgccatttcccatgggctcccatttgcctttatatctgcacagtttcattgtttcttaaaatatgcaaatattttgtatccctgcttctaccaaaatggaaaaataaatatacagtatgaaggccacaggactttttttaaaaaaacctacctatctcctgtagacatttggtttgtaacccctgtggtaggtaatattattatccctattttgctgatgaggaaatagaggcacaaggaagcaaataacttcaccataattatgtatctagaaagcatccggcaaagacatttgactataacgcctatactcttaaatggaggtctccaaactttttggtcctacacctctatataaataaaaaatgttagcatgtccagctaatatgtacattcacttttaaattatgtatgttcaccactaaagtaatatagtattcaattctaaaatacatgcaaaagtgaacaattttaaaagatgagaaaaaaattttaaaacatgaattttaaagtaattttaatgttatttaagatggcataaagatgtttacctttactaaaataaaaagatgttaataatatctttaatgacagcagtgtgatttgagtacattattattttttaaaacctgggtttaagaatttatgaaacagtgtttaaaggtctgaatctaaattcgatttatcttaatatttgctgaagtggctgacataactgaaaactgcattctacaacaatgtcccacatggaaaggtgcatgacaggcttgcttacagatcatgatattcattttttaatctcaaatgctggcgtacaatggtgtatgtggaattttggctagcagatcttcatattctcagatgtcaataagtatgactgacaattattcaaaggtattttttaaatacttgaaaaattttcaaatgccattgaacaccattaaaaccaggttttaaaattctgatctcaagttttttgagcatgaagctatgaaagattctttaaggtaagacgcaaacataagattctttaaggtaaggcccaaacatgagattctttaaggtaagacacaaacatctttttcttcaataaaaaatcacacaatggaaacagttccaaacattcatgttcaaaatattttctccagatctgattttctttaaaaaaaaaaaaagcagcggcaattattcattgttgagatggcatttttacctgaaaggaatggattgaatgtatttttcaaagataatttttaaatagcacactactggcagatgcttgtcatcacagaaaatgttggaaaatttgcaacttttaaactttttaaatttaaattttaaattttaacttggaactcatttttatgattgttagccctttcatgaaataggcccagtaagtataaaatattttcttggaactcttaaaaagaactcatcttgatgaatgataacccttccatgaaatagctggcaagtataaaatattttcatagctattatttatctcactgcaaggtattataaagatttgactgtatttccatgacctatatttctaaaattaaccatacacagtagcacttctggcctcaatccctcagctgagcatttgtctacaaataaataaagcactggatgattttcacatgcagcaccctttccagaaccttctcatggaatctggaaagaatggattctggaatcttgtggaatctggaatctcatggaacattcttttccccaacactccagccaaggcagccccctcactggtggccacacctaacagagtttgccataaagcattatgtttattaaattgattatttccatcttttctttattggctcacacaaaaaagttatgcattattgaaacaaatgcagcaaataccataagccaagatgtgctagaaacatctactcttaatgcaactgtaaaggaaatttctgcactatataatttgttggaatacttgcttcttcacatcttcaccatgctgtgtctgcatcttccaattgcatttactttcagtaaatacattttagtttgtgaccattgtgaaaatttattatacaaagtggaggcattactgtcacatccaactaaaatagagtcaagaggccttgaaaaaaacatgcaggttacaaggggaccacttcaattgaaacaacctgttgtgacttcaagactagtttttttctttctttctttctttctttctttctttctttctttctttctttctttctttctttctttctttctttcttctttctttccttctttccttctttctttcttctttctttttcttcttttcttttttttttttcacagggtctctctctgttgcccaggctaagtgcagtggcatgatcactgctcactgcagccttaacctgccaagctgaagtgatcctctcacctcagcctcacctgtagctgggacttcaggcgcgtgccatcattcccagctaattttttaattctttaattttttttttaagagacggtgtctcactgtgctgcccaagctggtcttgaactcctggcttcaagagattctactacctcagcctcccaaagtgctgggattacaggcatgagccaccacaccagaccaaaactagttttactgtggtagtaactgccaccactggccaaccagagctccccagctcaggcatagccacaagtgttaacaaactttctttcaagacaatttatgtagtttttctctctccttacaaaagctcaaccttctcctttgttctttggacccaccaggggccaccccagtctgttgaatgtgccctgacttgcaattctattctttgaatattcacagataacaccttttgcttgggattgcatccatccatttttatttgatattgccaccgtcttcttttcagattatggtagttactgtccctggggcaggaaaagcagttgcagagagaccatcttttctatgcctgggtgaatggtcatatcctttctacttttggtccacttccaacactttacctttcaatgttgtgaagtatctccaagaggtgctctaaggagactttttattttcttttgccagtgtcacttcttctgaggcatttttatccttttcatcacctccactttcctcatttatgtcaataagtttgccttcactacattctctggctgcaaacctagagtgtctcaaagggtggcagtgtggacatccatggtcccctgtttcttctataatgccatttatgttggattctatttcatttccagcattatcacttttcatttctttgctgcattttcctatttgttaataccttatgaggttgctcacagttaatctactgtggtaattgaaatttgagctgtgttgctagtagactagtattatttaataaagctgtaactaaaatttgtgcataatggaatcatgcaaagtgatgactacctatactggcaaagcatattttatttaatttttcttattttagataaaagttgttataattagttttaaagttttccctacctcccgatacaatgtcatgtgtatttgtgctattctgggcttctaatatgaacttattgagcttaacaacagaggtgatcataatatctccaagatataatttgcattttaatagtgcccctaaatacacaagtactgtgggaatttaggcagggcctgttggataacatccttactccaactactgagccttggttcccatgtcactctctcttcataggtaaacaatgaaactacttctttcattgattctctagttaagcttttctacatcttctgacattgtcttagttgtttgtattgctttaacaaaatacttgagactgggtaagttataaagaacagaaatttatttctcacagttctagaagctggaagtacaagatcaaggcaccagcagttctcacttgtgttgaggacccaatcgttgcttccaagatggtgccttgttgctgtgtcctttagctgggttgaatagtgtgttcttatatagtagaagagcagaagggcaaaaaggggcctacctagttccctccaacccttttataaggcactaatcttatctatgaaggtagagccctcatgacttaatcaccccccttaaggccctagctcttaccactgttgccttggggattaagtttcaacataacttttggagggaatgcgagcattcaaatcatagcagatagctttgtaaaataacttctaaaacatttttctactttcccaaatatgtcagaaaatatactagttacattttattccaagaaatacccatcctgaggtctctctcacacacacaaacacacacacacacacacacacacacttcacaattctgtgctccagtttgtactggttgcttcctagatcctctgtatagatgatgccctggatccttgttttgccattgtcctaagcattcttttcacctttctcctgtgctgggtcctttgttaccaaatgccttcatttatgccttcttttcagtacagtacatcctgtctggtttcctatgaaaaggcacatgcagggttaaaagttttgtaatttggtatgtttgaaaataagtctatcctgctctcacactttattagtatttccacagagtatagagttccaaaatggaaatcatttttcccttcaaattttgaggcattgctctactgacttgtattttccagggttactgttgagatatccactggagagtctgatcctttgtaagagtttggaaaagatgatatgaccagtgaaggctttttcccattcattttgccaagcacttggtaggattttcaatcagagatatgtgtccttccattctgagaaatgttctcatattatgtttttgtcattatcctttgttttctctgttctttattgttgtaatttctattagtcagatgttatatttccaggactgatttaattttttaattttcattgcatttccatcacatcattctttttatttcctttctaggaaattctcgctcattattttacaaccattttacttaaaattttttacacctatcattcatatacatatgtaatatatatatatctttcatatattctcccctcatttccaagagctgttgttccctcattgctccatttttacatccttttcttattaagaaaatgatatttttgtttggctcatgcctgtaatcccagcactttgggacgctgaggtaaatgggttacttgaggccaggagttcaagaccaactgatgaaaccctgtctctacaagacagggtttgtagatggccaacatgatgaaaccctgtctctacaagaaaatacaaaaattagccaggcatggtagcatgtgcctgtagtcccagctactcaggaggctgaggcaggagaatcgcttgaacccgggaggcggaggttgcagtgagccaagatcacaccgatgcactccagcccgggtgacagagcgagactctgtcaaataaaaaaaaaaagaaaatgaatgttattttctcatttttctaagaaaattcatgataatttaaaaatgttttatttctccactctgcattgtgtttctttgagtgccttttcaatttgcataggcccacgtcttctatgaggagatgttccccaagatcctactggtccttggctgtccagttccagtaacagggaaacatcaaactgtcaattatgtctgatggaagtttgctgacccatgggtttcatggtagaagcggtcctccttcctctcctccttcctcttctctttctcttcctcctcctctttctcttcctcctccttttttttttcttttttgtgtgactccacatgtttgattgtttttactttgacaggagtataaactggtacaactattttgggaaacagtttgttattgttttcctctgtggtgatgtagtttttctccaatctcttgctgtccctgagtctagagtttccctggtacaactgctcctttcacctacattggtgaggctggaggtgggcaagtcactcgattacagcaggcagggaggaggactcaggaatctcacttttctttatacaggattagtataatttataaggtaatatttaatacaaataatgtaatacatacataagttttggagcataatattaagatgagcattttaacccatcacccaatttaagaattagagcaatactaatacttatgaattttatgtatggactcttctcctctgccttcattttcctgctccaactggtaactccaagtctgaattttgtattttttgccatcttattttattttctaaaaatagtaaattgttgtatcacatatataagtaaccataaacaatatattatgtagctttgtttaattttgtgctttataaaaatggtatcatgctgtgttgtctgtgacttgttatttttcactaaatattttctgtttcatttatcttcttgtttccaaccatatttcattcattttactactgtgtgctatttctttgtgtggctactgtgccacaatttgctttttagagatggagtctcactatgtttgccaggttggtcttgaatgcctggcctcaagcaatccttctaccttggccttccaaaatgccagcattacaggcatgagctactgtgccccaccaaccacaatttttaaatttatttttctgtcaatggacatttggattgtttccattttttcgttgcaacatacaaccttatataaaactttcttttcttttacatatcttctagtataggggtcccgaccttccaggccacagactggtactggcctttataaattacccagtctcaggtatttctttatagcagtgtgaaaatggactaatacagcctgggaggcctcagaaaaattataatcatagcagaaggtgaagaggaagcaggcacaacctttacatggtggagcaggagacagagagtgaaggggaagtgctacacacttttgaacaaccagatctcatgagtattcactcactatcatgagaataacaagggggaaatctgcctccacgatccaatcacctcccagcagtcccctcctccaacattgaagatcataattcaacatgagatttgggaagggacatatagagccaaaccatatcatcgtgctcctggcttctcccaaatctcatgtccttctcacatctcaaaacacaatcatgccttcccaaaatcttaactcattccagaattaactcaaaagtccaagtccaaagtctcatctgagacaaggcaagtcccttctgtctctgagcctgtaaaatcaaaaacaagttagttacttccaaaatacaatgggggtacaagcattgggtaaatgctctcattctaaaaggggtgaattggccaaaacaaaggggctaatggccctatgcaagtctaaaacccagtggggcagtcattaaatcttaatgctccaaaataatctcctttgactcagtgtctcacattcaggagacactgatgcaaaggtgggctcccaaggccttgggcagctctgcccctgtggctgtacaggttacagccctcacagctgctttcacaggctggcattgagtgcctgtgacttttccaggtgcatggtgcaagctgtcagtggatctaccattctggggtctcaggatggtggctctcttctcacagacccactagacagtggcccaatggagattctgcattggggtttcaaccccacatttcccctctgcagtgccctagtagaggttttccatgagggctccaaccctgcagcagacttctgcttggacatccagatgtttccatacatcctctgaaatctaggtggaggctcccaagcctcaactcttgccttctgcacattcacagacccaacaccatgtggaagccaccaaggcttggggcttgcaccctctgaagcaacaacctgagctatactttggccccttttaactacagctggagctgtagcagctgggacaaagggcaccatgtcccaaggctgcatagaacatcagggtcctgcacctggcccaggaaaccatttttccctcctgggcctccaggcctgtgatgggaggggctgccgtgaagatcttggaaataccgcagaggcgtttcctccattgtcttggctaataacattcagctcttctttacttatgcaaatttctgcagccttgaattcctccccagaaaatgggttttccttttccattgcatggttgggctgcaaattttccaaacttctatgctctgtttaccttttaaatacaagttctaggccaggcgcggtggctaacgcctgtaatcccagcagtttgggaggccgaggcgggtggatcacgaggtcaggagatcgagaccttcctggttaacacggtgaaacctcgtctctactaaaaatacaaaaacttagccaggcgcagtggcaggtgcctgtaatcccagctactcaggaggctgaggcaggagaatggcatgaacacaggaggcagagcttgcagtgagccaagatcatgccattgcactctggcctaggcaaaaagtaagactctgtctcaaaaaaaaaaaaaaaatacaagttctagtttcaggtcatttttaattttttgcttatgcaaatgagcataggcttttagaagcagccaggcccatcgtgaccacttttctgcttagaaatttctcccaccggataccataaataatctctctcaagttcaaagttccagggatctctagagcaggggcacaatgccaccagtttctttgctaaagcataaccaaaagtgacctttactttagttcccaataagttcctcatctccatctgagaccacctcagcctggacttcattgtccatatcactatcagcattttggccaaaaccattcaataagtgtctaagaatttctcaactttctcacatcttcctgtcttcttctaagccctccaaaccattctaacttctacctactacccagttgcaaagctgcttccacattttcaggtatctttatagcaataccccacctctggtaccaattttctgtattagtccattctcacaatgttataaagaactacttgagactgggtaatttatgaagaaaagaggtttaattgactcacagttctgcaggctgtacaggaggcatgcctgggagatctcagggaacttataatcatggcagagggtgaaggggaagcaggcacatcttcacatggcagagtaggagagagagagagagtgaaggggggaagcactacacttttaaacaaccagacctcatgagaactcactcactatcatgcaacagcaagggggatatccacccccatattccaatcacctcccagcaggcccctcctccaacactgaagatcataattcaatgtgagattttggtggggacacagagccaaatgatatcgggtggcatggacattttaacaatattaattcttccaacccatgaacatggatagaggttggcatatttttttttcaacataccttttacattgaatcttgccattagtttatattttagtaagtctcttttaaatagtaggtagggggactgttctttttttaaatcaattttcagaatctcttttgagttaatatatgtataaatattaggactattggtatatttaaattcatttaaactatcttactttgtgctttatatttttctgcttttgctatgcttttggaaaaatcgattttctttgctttttcacttattgtgtcctactagttagaaagccataacctctctttttaaaatgttgccattggaatttattacgtgtaatgaacttaacaatatctgggtttttcaatatctggagcaactcaacaaacttagtgtactttagcattgagcatcctcctcccaacttggatatttttgtaatacacttttagttccgttatttttccccctcacaaaataaacactattatactaactacacataaagataatgacaacttgcctacatgtttgctaatttctttgctcacaattctctcctgtttcttcagtctttcttttgagatcattttcttactcctgaagttcattcattctttagaagtttctttggtcaatgtcttttgaaggtaaatcctctgtttgtttgtttatctgaaaaagatgttccttttgccttctgccatgactgtgagaccttcccagctgtgtggaactgtgagtccattaaacctctttttctttataaattacccattctcaggtatgtctttatcagcagcatgaaaatggactaatacaggccaccagactaatacagcatgaaaatggactaatacagtcaccaaagaggactttcaactttaggaaagtggagagggacccctctcccctgcccactgccacaaacacactcaatggcaaacactgcaacagaggatgtgggaaggtttgtagggagggctttgtgtgttttcacatggcatagagagccaaatggagaaatgaaagaaaagtcacttataattcaacaccaaaaccaacagcacaagaagcaaaggtgtccttttctcagttagaatcttaaaattaggtccttgaacttccccatgctgctggtgggagtgtaaattggtagccactttggaaaactgttcagcagtatatgtagtagttgaatacatgcataccctataactcaactacactgttaggtgtgtaccccaagcacgttcaccaaaagatatatactaaaatgtttctagtcacaagagaggaatgagatatagggatatatatgtttcagtgtgtgaatatctctctattatgtatctctatattatatattattatatataaatataatagagagatattcatacactgaaatactatataacactgagcatgaaaaaactacaactgtacgcaacaacatggataaacctcagaaacataatattcagagaaacaggccaagcacaaaagagtgcatactatacaattcccttatataaggttcaaaaataggctaatctttgagatagaaatcagatcagaggttagctttgacatgggctgttgcagtggtcggtgactaggtaggaggggtcacaaggggagcttgtgtaagtgctgaaaatgttctatttttttattagatgctggttgcatgggtgttgctatggtttaaatgttgccccaaaagtgttcattagaaatgtcacccacaatgcaatagtgttggaaggtgtgtccaaatgaaaagtgatttaggacatgagggctccaccctcatgaatgaattaatcctgttgtttagggcatgttttgttattaaaaggagtggctctgcaccatggctcatgcctgtaatcccagcactttgggaggccaaggtgggtggattgcttgagctctgggcaacataaaaaaaccccatctctacaaaaaaatacaaaaattatctgggcatcatggcatgcacctgtagtcccagatacttgggaggctgaggcagaaggagcccttgagccaggggcagaggttgcagtgattcatcattgcatcatttcactctaacctgggcaacagagtgagactgtgcctcaaattaaaaaaaaaaaagtgagttaaatccctttctctctccctaccctctttgtcattgcatgtttggatggtgtagcaagaaggacctcaccagatgctgcccctcaatcttggatttcctggcctccagaactgtgagccaataaatttctattcattctgaattaaccagtctgtggtattctcttatagcagcacaaaatgaactgagacaggtgtgctcactcagtgaaaatgttttgaactgcatgcttatgcttatgaattgttaacttctctgcgtgcatgttacatttcaataaaaaaagtttactcag

SEQ ID NO: 5 - DNA, 42929 bp, Homo sapiens
ggcttttacaaagagatcaacaatagaacaggagaaattctaccagatgcaaaaagaaaagggcaagggagaatataaacgtttgcctaattcactgatctgcttaaactgccttttaatgcttagaaaatagaaaggatggcacgatcctttgatgaaaggaggctgtttatgtcagaagaagtccagacctctcacagtgacgaggggagaataaaaaagctgcaacatcaggcgggtagtcccagtttcctccctcagttccgtgccaacaacctaagggtgctcgtctggcagggtctgtcctttttcacgtctttggagctcatcagtttttgggttcagctctctggaggtggtgtcctctctaaaatctagaatgtaggcaccacctgggaccccttctgccaaaggagatacaagcagagctggaggtcaacaaaccatggtgctcccaccctcttcaatcttacttcaggaagtgactgtggagaccaaaggcaggctccttggtggccctatccaagctgagctgggagtgaacatctgctggaatcccttggtagaaggctgggggtgctgtaccaagagattgtcttttcagaaatgtggtgagcaattatgcaagattcgagagctcagcagaggaaaaggggctcctagctgggaaggaagaaggaccccagagctttgaaacacacatttacatgcatagacacatgcacacacacacccccatgtattcataccgtgtgtgtatgaatgtacagatgatccctcactcatgatttgacttaacaatttcttgactttatgatggcacaaaggcaatatgtatttgtagaaaccatacttcaacgaacaacacaaccattcgattttcactttcggtatggtagccaataaattacataagatgattttgctcaactgtaggctaatctaagtgttctgagcatgtttaaggtaggcgaggctaagctatgatgttcagtaggtcaggtgtatgaagtgcatttttgacatacggtattttcaacttatgatgggcttataggaacaaaatcccattatcagttgaggagcatctgtttgtggagaaataatcacaatcctggaacaactcatctgaccaaattttctaatgttttatatctcagattacagtagaaacatgattattgtagaaaaaaatcaggaaatacagaaaaatataaagaaaaaaataatcccatcacagaaagaaacattaaacattttgcatctggcactctggtctttgaacttggcagatttagtgctctttattttgtttttcaatattggaatcacactcaatatactgttttatttacgttgacaatgcactgctaacctactttaagttatgaacatatcgtggacatttccccacatttccacgatttttattgttggtataatattcatgttaggatgtgcccaaccagatactttaactgcaatcaagataaacccatttactcagaatcttggctcacagcgtaagtaaaaatgactggatctctagttgggccctataatgcgaaaagtctcactacaccaggacggtatgttactggagaatggagcaggcgcagaacagggcagcctgctttctgtctctcctgtgtttctgggaagagaagctattttctcccctcctcctctgctgtgattagatttattttctaatctctctctgttcatttgtggtttattgtttgccagaagtccccatgtctgttgttttgtcattctgaagcggcttcgttgtctggggtaaatacccagggttcgttacctggcgccaagaaaatttaggacagggacacaaaggaggcctttaggagcgcaggtttaataggcagaagaaagagaaaggagaacagctttctctctagcgagagagcggggcttctgaaagggaaagacttgctggggcggaattctccaaatttttaggcaggtttgaagaggcggtgtctgatttacatagggcccacagatcagttcgattaggtgtgatgtttacatagcaggaggaaggctggctacctcaccctcatcttactatgcaaaagagctttccacttgacccgcgccatgttgtctgttccttaatgtacacgtggctggcactgagaaaaggaagatgggctgggcgcggtggctcacacctgtaatctcagcactttgggaggccgaagcaggcggatcacgaggtcaggagttcaagaccagcctgaccaacatggtgaagccccgtctctactaaaatacaaaattaactgggcacggtggtgcattcctgtaatcccagctacttgggaggctgaggcaggagaatcgcttgaacctgggaggtggaggttgcaatgagcctccaccatgccattgcactccagcctgggcgacagagcgagactccgtctcaaacaacagcaacaacaacaaaaacaaactaactaaccaaaaaaaaaaaaaaaaaaaaaaaaaaaaggaagagaagatggaaccgccattttgaacatgcctagtcccaggtagtattcctctgctggcatctatgtctgtagcttgatttcacaggctgctctttgttagaaaggaaaagtatttggggctggttttcattaaaaggaaaaccttaccgaggacttctgtaccctcactatctgccgaagtaatttatttttaacttgtgtattctctgagtggttcagagaatcttaataaaagaggaggaggtagggtgaccctcagcacttaggaaaatacggacacctcattctggagtgcctgaagtcagcctgcaggaactccctgtgtctgagaggcagccctcgctcttcctgagctagtggcagaggaaagcggctggaacagcagggtcctgtagtgtgggtgggagctttaactcacgctccttcctatctgttcccacttaaaaccatctgggctgtgaggaggtaattttctagcccttcaacttgtgtgaccacacacattctttaaagagatgtttactagcttcacaggattaaaaacaaattctcctttaaaaagttcaaaacaaacaaacaaaaaaaaaacctctcagttttctctgtgttccctcttctgactctccataagaaaggtatttgtggcctctctgaaccatgactcagattttcacttgagttttgacttttctcttttccctacaacttcctgttgctgctgtgaaatgctgttgcctgagagggcttttcttttttcccctgatttaactccaaggtgatttatgggtccctgtctcgatctatgtctcagtagagatgaggggaaaaagagacggccaagaccttcacggcctcctcattctcctgaccttagagtccagctcacacagaggctggctaggagtggaagtgccacttctccatgagggcggtccccattcctgacagtgccaactgaggattgtacatattttaggcagaaaagcacaggacctttgttttttagaattccactctgatttttcttcttattttttccctgtgctagtgacccaggaataaagctagggaaagagaaaatgtgatcattccggcctggggaaggtgaaaggacaggatagcaacaaataacagagaatgatgcataacagcatattgatagtcttcacagtttgcagagcattttcatatccattatctcattagctcctcacagccgcctgcggggaaatgcaccacaggcattgtgcttatcctggtctgcagactaggagctgcaggtctgcgatggatgctgtgagatgtcacccagacccctcgtcagggcggagaaactcactccccagctgtccagtgcccactgcaaacagccacaattgagtccctcactgggaattcccccgctgaaggaagctgcctttgccaaggttatctccctccctgggccctgccttgattccaggcaactctacggggccatcccagctccagaacaccctgtaggatcagctgagaaccctaggatcagctgagaaccttgtagcagctgcatcagaggtcagcttctctctctgcccaattttcctttcctccctctctccctccgggggttgctcttgagagctctccctgttaaacttcttgcatgcaagtccccatctgaaagtcttccagggaacctcactgtattggcccattcaggctgccataacaaagtacaacagactggtggcttaaacgatataaattcattgtctcacaattctggaggccagaagtcagagatcacaatgtgctctgggactctcttcttgagttgcagatggctgttttctttgtgtcttcacgtggtctttgctctgtgcacatctgtgttttcaatcttcttataaggataccagtcatattagattacagccctctctaacaacctcattttaacttaattacctctttaaagactccatatccaaatacaattatgttctgaggtacccggggttcgaggtatgagttttgggtggccacaatttagttcatgatacctacctaacacaatgttgaagagattgagtgacatgccccaaataaagcagtgtccccttatttaacaacttataaaatatcttacagccctgtggttctccctgatcttctgccacttataccttatgtaatggaatgggaaggtatcactgccaggaaatcaagaattaggatccggagtttctgtgctctgttcgctactacacgtgatctaccacaattgggaatctaactcattctgttctgctaaattgttgccagtgctcacaaacgcacattgtagtggacagtataataatattattgttaactgatgttattaatgaccacaaaatgacaaaattaaggacacacaaaaaaatcacctggagtatactcttggtgaagcaataacacagggtacaaaagaatacagaatacacagatctgggtctctgggataaagactagatcctaaaaattgtaactgatcagaaaaatacagagctgtatggtcccaagtgggaaatatttcatacaatggtgatctgacaagcttcaaatttttttcatgtgtaatgatgtgattgttaaacactagatacgcattgctggaaatttgattttccttgtctcctgacaaatccacacggatgaaacgctagctggaggagattggggagagaaaagaatatgattttaaatcaaaagtagttttgccttgaaaacagcatgctgtaaacttgactttagattctcactccactccttcctatattgtgtgctatgcaagtgcttttgtttcattgtgcctcatttttttctcagctataaaatggagataacaattttttcgttgtagaattattgtgaagattaaacagatttattttttatttttattttattatttttttatttttttgagatggagtctcgctctgttgcccaggccagagtgcagtggcgcaatctcggctcactgcaagctctgcctcccgggttcacgccattctcctgcctcagcctgccgagtagctgggactacaggcacctgccactatgcccagctaatttttgtatttttagtagagatggggtttcaccatgttaaacaggatggtctcgatctcctgaccttgtgatcctcccgcctcggcctccgaaagtgctgggattacaggcttgagccactgcgcccggcccagatttattttttaaatgtaaagcaccctgcacagtgctggtgtatagcaggaactccacaagtgttagtttctggctcattagagagaaaacctctcctgctaatcaatgcattgctacagctgccagcaaaatgagagaaagaccttcaatgccacccccaaatctatcccttatgcataagggaggtggatattctctttcaacttcaggattgctggtggaggcctctgcatcactgcactgagccccgcaataatcctgctagctgatctttcagggtccccagaacaccggaagttctaaagggttaatgcatgcaatggataaggaagagaataaaccaagtaagagaaagagagagagagcactatacagatgggtctttcttttttcttttaacttttattttcggttcaggagtatatgtataagtttgttacctaggtaaacttgtgtcatgggggtttgctgtacagattatttcatcacccaagtactaagcctagtacccaaaagttatttcttctgatcctcgccttcctgccacactccaccctcaaataggtcccaatgtctgttgctcccctctttgtgtccgtgtgttctcatcatttagctcctccttataagtgagaacatgaggtatttggttttctgtttctgcgtgaatttactaaggatagtggcccccagctccattcatatttctgcaaagcacatgatctggttttttttaaggcagcatagtattccatggtatatatgtatcacattttctttatctgatctgccactgatgggcatttaggttgattccatgtctttgctattatgaatagtgctgcaataaacatatgtgtgcatgtgtctttatagtagaagaatttatattcctttgggtatatacccagtaatgagattgctgggtcgaatggtagttttgtttttagctctttaaggaactgccatactgctttccacaatggttgaactaatttacactcccactaacagtgtataagaattcccttttctccacaaccacaccagcatctgttattttttgactttttaatagtagctattttgactggtgtgagatagtatctcgttgtggttttgattttcatttctctaatgatcagtgatattgagctttttttatacacttgttggccacatgtatgtcttcttttgaaaagtgtctgttcatgtcctttgcccactttttaatggggttgcttttttcttgtaaatttaaattccttatagatgctgaatattagatctttatcagatgtatagtttgcaaatattttctcccatactgtagatcattgttgtttactctgttggtagtttcttttgctgtgcagaagctcttaagtttcattagatcccagctgataaacaacttcagcaaagtttcatgatataaaatcaatgtacaaaaatcactggcatttctatacatcagcaacagccaagctgagagccaaatcaggaatgcaatttcattcacaattgccacaaaagaataaaacacctaggaatacagctaaccagggaggtgaaagatctctacaatgagaattacaaaacactgctcaaaggaatcagagatgacacaaacaaatggaaaaacattccatgctcatggataggaagaatcaatatcattaaaatggccatactgtccaaagcaatttacagagtcagtgctattcctatcaaactatcaatgatattcttcacagaactggaaagaaaaactattttaaaatttatatggaatcaaaaaagagcctacatagccaaggcaattgtatgcaaaaagaacaaagctggaagcatcacgtcaaactatactacagggctacagtaaccacagccacctggtactggtacaaagagacacacagaccaatgaaacaggataaagagcccagaaataagcctgcacgcctataaccatctgatcttcgacaaaactgacaaaaaccagcaatggggaaaggactccttattcaataaatggtgctgggataactcgctagccatatgtagaagactacatatacaccatatacaaaaatcaactcaagatgaattaaaaacttaaatgtaaaacccaaaattataaaaaccctggaagacaacctaggcaataccattctgtacataggaactagcaaagatttcatgacaaagacaccaaaaacaacaataacaaaagcaaaaactgacaaatgggatctaattaaatctttttttttctgtttattctgttttcaaatactcattatagaacatttcacccaattcaaaaagatacatagaagagggtgagaagatttaacattttggtgaacatccttccatgtctttctttatgctaaaatacatgagtgtaaacgacttttaaaaaagggttttacactatgtgctagtttgaaaactgcatttttttcaccaataactcatcatacctattcatcatatcaatgaatatagacagacagtctttaatagctgcaaaatatcccattgtatgtttcagaatttatccaatcccatattgctgaatatttaggtactttccatttatttgttgtcaattataataaaatattttgttaaacgactttgtatatgcattttctcaaacttgtccaattgtctttaggataaattcctagactaggattgcttggtcaaaggacactggctccataaaagtgattaacaatttaccttcccagctcaagtgttagggaaatcccaaattccagctgtctcacttcaaattcatgatgataaaatggaaactcaacactggaattctattatacatctctacgtggtttgctttcctactcttttaggataattctaaatcttttcattatgccttaaccctactgcaccactttcccctcttatatgctcagttgatgtcctggtttcattctttaaaaaaaaaagtcatgaagcacaccaccattttctgtacacccctaaatcaacacacccctcccacccccacatacacacacactggaacccattttctctaccttcctccttcactgtggcagagtccacatggctggcactgttcagcatctcacttgagccacatttacgaaacaactcaaggacttctctccttctcaggtactgacacataaaatcaataccaaaactcaacaaagatagactaaaaagaaaaaataggtacagatcaatatcatatcactcatccattctttcagtacacatttattgaacacctactacataccaggcactaagggaagagaatggtgagtgatataaactagatctctatcctggaagtatttataatccagtggtagaaacagatataaactcaccaaaaacaagataagcagattgcttgtgatggatgccagctagaaaagagagactgactggatagacagcaatggggtggattcagagccctagaaaggaaggtcagggaatgatgctccgagaggagatacatgaagaaggcagccatttgaaagttcttcagagaagaagtttccaggcaaaaaaaaaaaaaaaaaagcaagcccagaaatcactctgacgttggaggcaaagccgggaagccagggtgggtggagagcagtgcatgaaaaaggcaggaagggtacaatagtgtgcaataggaagggggctggactttattgcaaattaattgagaacatgttaaagaatatcaagcaacatgcttgaaatttcatttttaaaagacctcttgaggtaaactgtggaaattgaactttacagaaacccaaacaactagttggagaatagcctcactttttatacattaaatcacataaaactccaataatgcaatgatggataaaaaaatccactgtctcacacaaaaaaaacaaaaaacaaaaaacaaacaaaaaaaaaaccacaaagaaaacaaaaccactccaaaggtatatatcatagagtgcaaaaatcccacattcaaagcagaggtgaattacttgtcaggatcccttagtgctgaaactgcatgtggagccctctttctttctttctttcctttctttctttctttggctttattaaagttttttttaaggaaaagaaaaaaaaccagatttatgcttcggaaaaaaattttggcatagattctaaacaaacacactaaagccatattctttaatcttcttagattcataaatgagctatttccttacttaagtacaattaggaatggcttattttctcaattttaagtgagtttctgaaacatatcacatgacacagaggatgggtggaaattagaaactgttgctgctgtgatagttcatgaatcatatgatcttgcttttcctccataatttgctaatagcgtctgaaatctaagaccaccgcaaggaattaacatataattcaatcagagttaaaaggatattacccaagttagcgctgtcggtttccagcatgcaagtggtgacaaattaggaaatcttttttttatttatttatttatttatttatttatttatcattcttttgtatatttaagattgtcctctctaaacatttggatatccatgtaacactgcctttaggataaaaataagatggggagggggtctggagttgtttgcagatattttaacacatgcttgaagtaaatatgtagaaaaataaatgtttttacacatgtataaattattccacccccagagagtcactgctcttaggtagccacaggagatggatcttttgcatgtaaacgcagttggttcccttctatgaaaggctctctggctttctctttgtttccccttcagactttgtgggggccactgtggggacatcttaagtcatgcatttcctaggctaattattccagcgaactaagcctgctgggcattaaggctgtggtttgtgctattactactctaagatcaacgttctctcctatttcattacgttcaaggtcactaaggaaagattttaaacccaaagcggtgcctccagagccctgggggttcagacaaggcattgcttctcctagtatcacctacatcctagcagcctctcattattgcaagttgttttgtggaattctgtaaacgaggctaatttctcacaatgttaataaaacagatatttacctaaccacatttttagagcagaggtgaagggacacaatcggtgtagaaattgttgcaagagatcataaggtcagacatcatataccttccaggcattcctggcgcctttccttcctcctcccgcgtaactcttcccagcacaaaatttccctttctcagatcagaaaggaaaagtacacaccctcttcgcttcctaccccccttctgccttttccccacagctgttcttgttgcattttcatttctctgttctggtccatcgatcctaaaggctttggagtcctgcccacccaaaccgggtatactctcttcatgggttcagaagttctccttcttcctcaactaccagcttcaagttgtcactacttttctcactttccttttttgaaaaccagctttactgtgttcatgatcatttctgagacgtcttattaaaaaaaatagccctccccacacttcctttttttttaaagcttgcattccagctggctaggagaagaaaggtccctgtcgagctgggagtcgaggttttattcatttcccctccattacaggaacgcttctccctcaatcctcactgttagtagaaattctgcttagtttctcaatcaagcctgcatttcactcatctcagtcttctctagcttctctcctcactccccgagcatgctatgtaaagttgtatgtgtcatacttatcccaattattaaagaaaaaggacgcttaactaccatcgattgaattcccagtgtaagtgtcctttcctccctaaaagtaacctcgaattcttctcttaggctgagtgatcctgggagaaatgaaatatgtaacattcttaagtataggcagctacatgcaaacaaccacacacattcttcttcaaatactttggtgagatgattcctattctttaaagaaaggcacttccaaggatacagttatgaacattttgtcttttatgtctttccacagttacaacattttcactaagataagcagcttttcaatgaatttgatcctttcctgaagtaattgttcaaaatgtctctaatcaccaccctaactaggtttcctttggggactggggctagcactgctcatctcagattgtgaacgtctatcctaaacccatgcagcattcttatcctattgtgatgaaatccacagggttcaaaagttaattcttccatgaatgtgtaccaggtgctggggaaggctgggaaggagaggctgggtggtacagatgacagagttcctgagggtctagttgagcaaagatatattgaatacaaaaccaaaaataacagcatgaagtcaatggaataatagtgtgaagtgctcaagggagcccagaagagaaaactgtcccataatggaaagaggagggtaaaaggaagggagtttcacagcagacaaggagaaggggcatttttggctgaggaaacagccttgaaatgtaggctatacttagagaccatttagcagtctggcgtggctaggggggaaatttgataattccatggggaatgagacagacacagaatgtctaccccaaatcctaccatctgggggcctagaatccttctttgcttcatgtcagtaaggccaagaaaagtacttttaaagaagaattttaaaagatttgcatggctagtgaaatctttgggattgtaggaagaaatcacaataataattaaaattattataactattattttgtcaaactccaagtgatttaagacatacatagtattttatagctgaaggaacttcaaagaccatttcatccagcctgcttattttacagatgaggaaattgaggcccagagaaaagttccttgctgcaaatccactgctagttgggaacaaagctaggctggagcacagatctcttgcttcctaagccagatcgcttgccacgaaaatgtgccaatctgtgcacccccactaccgatttgtcctgtttctcagagaagaaaaaacaatggttagagtttaagaggtttccctgaagtcacccaactcctggtggctcagatgggactcaaacccgggatgttggggacatgtagccaacactctcctgtaaacattcttactaaaactaaacccattcacgagggatgaagtgtgagacagaagagtgagtgtggtgattagagccccccaacccacgtatctccagtcatgacctgagtaagaaatacaggggctgaaagaggtctgctttgcctcagctaccaccagcctaaccacgcacggctaagcctcaaggagttctccttcttcactaagggcttagctgcaatgtggtttaaattagacatttcttgcctgagtagaacaaatcacttaggttatacgctgacaaaaaaggaacagtctgcatgcttggaaagcttagggggaattaaattatgtgctgtcacttcagagttgttcctctgtcctgtacaccaccacctctcaattgcctgcaggagctgcagggccttgcgtgcaagctgtgccataacccaaggcttaacataaacttcgggctctcaggtcattgggaaataacaggtatatccggttgtgccttttgtgcttgtctgcacgcaaattaaaagctcgtgctatgctgaactccttggagcctctggttacagagaagggaggatgccttagaatggaattttcacacaattgtcctgtttgtttttccagggaattgggtgatagtgtgtgtttgtaagaagttcacacctctgggaggctgagctcagaaggggcgggatgtggaggtggccatgtgccaggcgaccctctagggagcagggctccaaaggaccccacgtctgaactttgaagggacggtagtgcttacgggggcggcggggaagggcggggtttgcgcagatctcagacttcctggctagtagcaacaatgccaagtgcagagctaggtggggaggggtgcaggaagggatctgaaagcttgggggccatgtactcaggctgtcacctccctaagggaggctcctcacctccctaagttttgtgatgcccccactacagttcagccctgaaccctccagatggctgattggagtaggaatgaagcgtccactccgtcttcatgtttcttcccatgggacacaataatattcccttcgctgtgactacagcctccccccagttaagtaggagaaatctatgcctactgcactccaactgtgagatttcctctggcaggagtttgcctagctggtgcagctgggaagcagcagagagtttttgcagcccggcggaactgaattcaaatttcagctcaaccaacatagtgtgtgtgaccttgattgataattccaactcttcctgccttgctttatttgtctgtaaaaaagggatgagggcaatggttatctcaaagggttggctgtgtgggattaatgaaatgatttctgtcaagtgcttggcacattgcctggctcaaaatgctccatatatggcagttcttacatatatgacagtacattattattgttaccattggtttaattggcagagctgcgatccaaaaatttcagactgtggctcgatcctgggcttcgatttcaggctgtggctaagaagccctcctggcttcacacctaaccaggatccacatgcctcttccactgagctgggctctcccagcttcctgactcaggcactacctcgtctccgggccgcaggggtttgggcatcattctgtctgcctcttcttcctcctccttcctggggctaaggtacatcatctgggcaggtagctgtcttgggaagatgacatctttctagccagacacctggtggtggcaactctgcaatagtttagagggttgcagtggtgtttcaatgcgcccacacttgtctcagggctattctcttaaaatcagtaactgggacattattttttctgaaatccaccgcaccctcacctacttcctacgccaagacaatagcccatttagatttttcttggatgaagagacattcacacacacacacacacacacacacacacacacacacacaaacaaaaaacacacttttttttttttttttgagacggagtctggctctttcgcccaggccggactgcagtggcgctctctcggctcactgcaagctccgcctccggggttcacgccattctcctgcctcagcctcctgagtagctgggattacaggcgcccgccacaacaccaggctaattttttgtattttttagtagagacggggtttcaccgtgttagccaagatggtctcgatctcctgacctcgtgatccacccgcctcggcctcccaaagtgctgggattacaggcgtgagccaccgcgcccggcccaaaaaacacactcttaagtttagacaatggttctcaaagtgtggtccaggcaccccgtcgggatggcccctgagaccctttccaggaaacccacaaggttacagctgtgggaataaaacattatttgcatttctaactctcattctcttacaaatttactggggggtctttctgcagaaacagatgtgagtcacctgctatcttctgttaagtcataaattaaagagatttgtaacaatattttttaaaactgcccactctgactaaatatttgtaattttggaaactagttattttccataaaatgttatttatgttaacatgtattaggtttattatttttaatgaactaacaaatattttataagtttttcagctttaatttctagaattataaatattgatagatacttagctaaacaatagttctttggactctacaatattttttaagactttgaagaggttctgaaaacaaaacatttgagaaacattgagctaagattttggcactggggcctatgaaatcattgcttttgctcacttacttctaaataaaaccatcatttctgaggattggaatagtgtgaattttatggtaatttcaatataatgggtttgagtgtagcagatctagtcatgaagcccatgtggaggctgcatgccaactctctgcatgttccagccactgtgttaaaggaagattttctaagccatcccaagatttgattgtaaattgtggagattaaattgctgggcagataccaaggatattctgcaaggggaggggaggaagagggtgtgagttgcatcaggctctggcaacaagatggctttgcttgttgtggtcttgggctcctggagggagtcagctcacagggcaggagaaggcagtggggtggcccaggtccctaataggcataacagtactagagacctctacagttactgtagttagaggggtggggcttctgtaagacttaggatgatacgcagtgagtcaacaaatgtgtactggtgtggtatagatgggctttggtgcctgcagacctgaattcaaatcctgacccctctcacttgcaacctctgtgacatttggcaaatagtttactgtctctgagccttaatccctttgtatataaagcaggctaaatataccaatatttttaggatgattgggagaaataaatgaaactgtcaatgtaaaaaatagaaaacagtgcctggcacttagggggaaatattagctactttctctgtctccaaacttgttgtgtggtgtgggagactctaagggaacggaggagcttaagccacaggccctggccttatgatgataacatcagagagaatgctcctcacatttagcaggacacagtgctccgactgtggtactcaaaattgttgtggtgtttattccttgttgagtgatatgtgttactcaggaggctgaggcaggaggatcccttgaacccaggagttcaagaccagcctgggcaacatagagagaccctgtctcaaaaaaaaaaaaaaaaaaaaaaaagatacgtgtaagttgctcttcacctctctgatttgctgcaggaagcctcaggtattaggttcagagtccagagtaaatgagggcagaaatggaggttcccaccagccctgagtgccttctgtgcacttgctgtggaagaggattccattttaccccgtagctcccgggattccactggggtgtggctggtaacctgggggctcagggctcagtcacatccttattgcaccagaaagtccctgaaatagtgtaggagaatgaggtgcctgggggcatggctgctggttggaggccacagtgccaccttctcaaggctcagaaactgggaagccttccttccttctgcattcaaacccttaaaatgcacaacccaccccccgtggctgactcagcacaatgggaaaaggaaaaacggaggttagtcagcccaagagtacagaccattgaatctaactttccattttggactggagagcattcgagacaatttcctccctggcctttagtaagggagagctgggagtctcccgttctgccttctggtacaggctccagaagtaggctgtttccctcattgtggctgtcaaatgggctgtatgccccaggtctgaggccacagtacactttgactcagagctgtaatgtaagaaaaaaaggcggtgttttctgggaagctggatagcgttgcgtcatttgtacaaatcaccaccgggaggtcccacgacagcactcccttgagtttcctcccaattgcactgcacagcatggagttttctgaactctcctcagcagggaattgcatgagtgttgtcctggagcctcattgccacagggctacaaagcatccgtaacagtcacagagggactgaccgaaagcatagcttggtggaagaggcctactatggcctcatcaggctcttttgggaacatggcatccccctgcctaaagaactgtctctgtactacctaagggtcctgatgtggagcgcgtctgggtgaggagaaattagatgaggagaaagtgctgcagagctgccatctgggagttggagggaaacacaaattggctattggtgctgagctcttctgccaacagcagatgtttctgtgagatcagccttcttaaggcagcggcaaatggcctcccacagaataatgataacagctaatgatgcctgagcacccaccacatgccaggcacccttctaaaagctttacatgtattagttcattcagtcctcaccacaactctgcataatcggtactggtatcgtctccattttacatctccattcacttaagtgtaagctggacccagagaagcgatttctagcatggaagtcactccggtgtaagtaggagagccagattcagattcagtctggctctggagtgatgctagcagccactcaatgtgctgcctgagaaacgcaaggaggaagtgactggtgccactttgggctgttaggaatttgcaggtgggtaacggcacgccaccctgagagctgtcacgctgaaccaagtgggccatgtttttattcctgcgaggttcaagtccttgccatgtcttggattttactggacagaagtaaggacttagtaagtagtagtaataatgataatggctaactgttattgggtgctcactctgccatcaactatgctatttgttttcttacaatcaatatctcatttaatcctcaaaaccaccctctgtggttggtatattacctgtcttgtacaagtgaggaaagtcaggctcagaagggttaaataacatggccaaggttacagcttataaataagagagctggtgctcacacccaagagtgcccggtcccagaagccaaactcctaatgattgggtatgctggctgtattgcctttgatatcctctggaggattagacaagcccagaaggcatttgggcctgcgcccacggcctgtaaagaattgccattcatctaagaggggatatggaggtgtgtggagttggctctccaatcctggcttctgtgatgtgttccatagggatgtggaggtccggaatcacccccgtctaatgttttatcagctttcatctggggatttccctcatttgtcaggaagaggagataatctgaacacaggcatatgtattctttaagagaagaaataggtctgaaagacaagtaaaatttttgttttgtttgttttgttccatgttggcaaacctaagtcaaagtaaccatcctttatagaaggaaaagtatttaggtacattctacttggtacaaagccaaggttcatagagatgggaattggcaaacctttttagaagacagtgaggatgtagcatatatgcatatatccctatggctcaagcatttctattgagaatcgatactgggggaacatttgcaaatggattcagaattgcacagaaaagtgaaatcactgcagtggagtctctaataatagagttgagaacaacacaaatgaccatctaagtcgccgttgatggttgaaaaaataatgttggccaggcgcagtggctcacgcctataatcccagcactttggaggctgaggtgggaagatggcttgagtccaggagttcgagacaagcctggacaacatagcaaaaccccacctctaaaaaatactcaaaaattagccaggcatgctgccacgagcctgtggtcccagctacttggaagcctgaggcaggaggattgcttgagcctgggaggtggaggttgcagtgagccaagatcacaccactgcattccagcctgggtgacagagcaagaccctgtctcaataataatagtaatgacaataataatgtcatggtcataccatgcagtagtttaaaatcatgaagtagatctatctatctatctatatgtacaaccgtatgcatgtacataaatagaaggcacatggtacccatggttactctgggaaggggtgggagtgtgagttttctcattttattctcatttttctgcatatttttatatactgattgactctcttgcaacaagaatctatgttactacgtgtgtgtgttttaagaataaatatctggccaaaatagaaaaataatttaatatgcataatattctggatgtataatgatgcaactatataacataaaccgcagtccaaagatttttgcctagaagtagtccagactgggccatgctttccctggatagtcttcctgtcctgtcctagtctgtgctcctgggagtatcaacatggcctctgtaggccagaacaccatcctaaagccacaagatgcatttaatagaaataaatgtaaaatctcacatgtagtatttttttgaaaaatcaataatacaagtacaactgaagactcagccagctaccaagtcctatattaaaggatgaagatttttgcttatcacaatcttagtagaatatagatgttttaatagtgggatgcaaatatattaaaacagggcaaaaactttgtttgcattgaaagtaacactatgtctaatgggaagtaaccacacccccctgggctagacagaatgtcatatttgggatactatgttcagtttcaggcccatactcagatggacatactgaaaaagcacattgtccagaaggcagagataaggaactggggcatttttaattggtggaaggatggctcagaagcagcacaattccatcttcaaacatgtgacagcaaaggagaatgagtcttgctttatgtcactccaaagaatagctctagatttaccagaaggcaagaaagttcactccagaatttttcttaatattgggaagaaccttctagcatctacagctttctaaccaaagcagtccaacaatagaacagacaacagttgagaaatgatcacttcaatagtagaagggaaaaatcctgttgggagtcaatggtcaaaaaagctgacgtataactatccagcctttgtgttctccgttgggatcatgcaggggaggactaaccacttaagttatttaactatcaattattttctcaaaccctggatacacccagagttttcaaccggaattttggtccatttgtggaaagagaaaaaaacctgtgagggaatgcagatctaatgctaaaaactaagaggtgaatggagagagagagagggagagagagagagagggagagagggagagagggagagagggagagagggagagagggagagagagagagagagagagagagagagagagagagagagacagacagacagacagacagacagacagacagacagacagagagagaaagaaagactagaatctggatgctaaccatccaaaaacctggaggctgtaccagtcaacatgtccatggctagatgttgtgatcttagctgagcccaaatgtacattcttttggtggtggggtgttttacttgttgctttatgtattttcttggtaacctggtaaatatttatttttagaaaatgaaaataaaaaggaaaactagtatcctttatctgcctaaaggttttctatggttggtcaaagaattagggaagtaaagtgtttccctattgaccaaagttgtggacagtaggctccctctttcactgttagaaaagttgatttcaggctgggcgcagtggctcatggttgtaatcccagcactttgggaggccgaggcaggtggatcacctgatgtcaggagtttgagaccagcctggccaacatggtgaaaccctgcctttactaaaaatacaaaaattagccaggcatggtggtgcacccctgtagtcccagctactggggaggctgaggcaggtgaatcgcttgaacatggcaggtggaggctacagtgagtcgagatggtgccactgcactccagcctgggcaacagagcaagactctgaaaaaaaaagaaagaagaaggagaaggaaaaggaggagagaaaagtctatttcaggaagtagagtaggtggtagtagaagctcagagaacaaacgtacaaaaacaaccacagaccctggcgtcccttcccttcgtatggaatcatcactgtgccaagtcggtgggagcttcaccccacaaatattaagcagcagaggcacatgctcaaacgttgagcaggagaggtaagtacaccagttgagagcccagacaaagtgactgaccaccgtgactatcttttagccccagggctgggtatttttttctttttctttttcttagttgctgtatctctctgctcccccttcttatttccctcactcttttcccctctgccctgactctttactcttctgtgtgagagagaatgaagagaggaagggagacagcagaacagaaaagggggcacctgagacgagagtggaggtcttgagggaatgagggtgaggaagataggagtggacccagagaaagggaaaatgagagacagaatgagagagaagaaagaaggatgaagcaaggggaaggaaaagggcagaaggaagcaaaccaaaggaaagaactgggaatgatgctgggaaaaaccattaaagcacagcaccatttgctgcatttatgaagcacatagaaccctgagtagattatgccccttaacacaggggcacagtagaactaagggcatgacactgccttatatcatatttcttctgctttcaaaaggaattgaagaaagcctaagataaaagagacaagacacactcaagccattcaaagaacaaggacggcacagaaagtacaggttataatccatagtgctgaggagaaagactgcaattgagcacaaactttttattagtcctgaactccaggagtgacacatcagatgcaggaccctgaacagcagactaatcccactttctttccactgtccttgcttacaagaaaccctcaagagaagctaagaaggcaatgtaagatcaaaatgttgggaagatctttttttatgttcttatatttaacttttaattttgatataattacagaagagtttcaaggaatcacaaagaactcccatttacccagattctccaattaacattgaccacacttactttctcattctcctctctctccctctccttctccccaaacccctctattttttccttgagccatttgagggtaagtggcagacattacacccctttacctctaaatatgcattttggtgaggaactagaatacatgtagctttcactacatgtatttctgtcactttcactaataccagacagagctcatgggcaacgagattggaaggggagcaggagtaggaaacttgttttaagctgcaactacttagcaagtgactatcttttcttagattaatttaggtcaataaaaatagcagaatcttctaaatcaccttctcaccaactttacataggattgagaaaacatcaattgtctacatttgtctacatgaaataatattaatagaaatgaggattggtagccaatacccttggtgctaaccactccaagaaatctagaaagtgcttaatacaaagaaagaatccttgtcagcctgtattgttaggcccctgagcccaagctaagccatcatatcccctgtgacctgcacgcacacatccagatcgccggttcctgccttaactgatgacattccaccacaaaagaagtgaaaatggcctgttcctgccttaactgatgacattgtcttgtgaaattccttctcctggctcatcctggctcaaaagctcccccactgagtaccttgtgactcccactcctgcctgccagagaacaacccccctttttcctttacctacccaaatcatataaaacggccccacctgtctcccttggctgactctctttttggactcagcccgcctgcacccaggtgattaaaagctttattgctcacacaaagcctgtttgatggtctcttcacacggacatgcatgaaatttggtgccatgagtcggatcgggggacctcccttgggagggcaatcccctgtcctcctgttctttgctccatgagaaagatccacctacgacctcaggtcctcagaccgaccagcccaaggaacatctcaccaattttaaatcgggtaagcggcctcttcttactctcttctccaacctctctcactgtccttcaaccactttctcctttccactcttcaatctctcccttctcttaatttcaattcctttcattttctggtagagacaaaggagacacgttttatccgtggacccaaaactccggcgccggtcagggactgggaaggcagccttcccttggtgtttaatcattgcagggactgcaatgattattcacccaggtttcagaggtgtcagaccatgcagggacgcctgccttggtccttcacccttagcggcaagtcctgcttttctggggaaggggcaagtaccccaaccccttctctccgtgtctctaccccttctcctcctttctggggggcaagaaatccccaaccccttctccttcaccctgagcggcaagtcctgcttttctagaggaggggcaagtaccccaacctcgtatctctgcaccccaatcccttatttccgtgccccgacctcttatctctgcgcccaatctcttatttccgcgccccaacctcttatatctctgtgccccaatcccttatttccacaccccaacctctaatctctgtgcccccatcccttatttccgtgccccaacctcttctccgtgccccaacccctttcccgcttttctggaaggtaagaacccccaaaccccttccctccatgtctctactctctcttttctctaagcttgcttccttcactatgggcaactttccaccctccattcctccttcttctcccttagcctgtgtcctcaaaaacttaaaacctcttcaactctcacctaaattaaaatctaagcatcttattttcttctgcaatgccgcttgaccccaatacaaactcaacagtagttccaaatagccggaaaacggcactttcaatttttccatcctacaagatctaaataattcttgttgtaaaatgggcaaatggtctgaggtgcctgacatccaggcattcttttacacatcggtccctctctagtctctgttcccaatgcaactcatcccaaatcttccttctttccctcccacctgtcccctcagtcccaaccccaagcgtcgctgaggctttctaatcttccttttctacggacccatctgacctctccccacctccccaggctgctcctcgccaggcccagctaggtcccaattcttcctcagcctccgctcctccaccctataatccttttatcacctcccctcctcacacctggtctgccttacagtttcgtttcgtgactagccctcccccacctgcccagcaattgactcttaaaaaggtggctggagctaaaggcacagtcaaggttaatgctcctttttctttatcccaaatcagatagcgttttcatcaaacataaaaacccagcccagttcgtgactcctttggcagcagccctgagacgctttacagccctagaccctaaaaggtcaaaaggccgtcttattctcaatatacattttattacccaatctgctcccgacattaaataaaactccaaaaattagaatctggcactcaaaccccacaacaggatttaattaacctcgccttcaaggtgtacaataatagaaaaaagttgcaattccttgcctccactgtgagacaaaccccagccacatctccagcacacaagaacttccaaacgcctgaaccgcagcggccaggcgttcctccagaacctcctcccctaggagcttgctacaagtgctagaaatctggccaccaggccaaggaatgcctgcagcccaggattcctcctaagccatgtcccatctgtgtgggaccccactggaaatcggactgtccaactcacctggcagccactcccagagcccctggaactctggcccaaggctctctgactgcttcccagatcttcttggcttagcggctgaagactgatgctgcccgactgccttggaagccccctagaccatcacagacgccgagcttcgcgtaactctcacagtggaaagtaagtccgtccccttcttaatcaatacggaggctacccactctacattaccttcttttcaagggcctgtttcccttgcctccataactgttgtgggtattgacagccaggcttctaaacctcttaaaactccccaactctggtggcaacttagacaatactcttttaagcactcattttagttatccacacctgcccagttcccttattagggcgagccactttaactaaattatctgcttccctgactattcctggattacagctacatctcattgctgcccttcttcccagtccaaagcctcctttgcgtcctcctcttatattcccccaccttaacccacaaatataagatacctctactccctccttggtgaccgatcatgcatcccttaccatctcattaaaacctaaccacctttaccccgattaatgccaatatcccatcccacagcatgctttgaaagggttaaagcctgttatcacttgcctgctacagcatggccttttaaagcctataaactctccttaccattcccccattttacctgtcctaaaaccaagcaagccttacaagttagttcaggatctatgccttatcaaccaaattgttttgcctatccaccccatggtgccaaacccatatactctcctatcctcaatacctccctccacaatccattattctgttttggatctcaaacatgctttctttactattcctttgaacccgtcatcccagcctctctttgctttcacttggactgaccctgacacccattaggctcagcaaattacctgggctgtactgccgcaaggcttcacagacagcccccattacttcagtcaagcccaaatttcatcctcatctgttacctatctcagcataattctcataaaaacacacgtgctttccctgctgatcgtgtccgattaatctcccaaacctcaatcccttacaaaacaacaacgcctttccttcctaggcatggttagtgcggtcagaattcttacacaagagccaggaccgcaccctgtagccttcctatgcaaacaacttgaccttactgttttagcctagccctcatgtctccatgcagcggctgctgccgccctaatacttttagaggccctaaaaatcacaaactatgctcaactcactctctacatttctcataacttccaaaatctattttcttcctcacacctgacgcatatactttctgctccccggctccttcagctgtactcagtctttgttaagtcccacaattactattgttcctggcccggacttcaatccggcctcccacattattcctgataccacacctgacccccatgactgtatctctctgatccacctgacattcaccccatttccccatatttccttctttcctgttcctcaccctgatcacgcttgatttattgatggcagttccaccaggcctaatcgccacacaccagcaaaggcaggctatgctatagtacaagccactagcccgcctcttagaacctctcatttcctttctatcatggaaatctatcctcaaggaaataacttctcagtgttccatctgctattctactactcctcagggattattcaggccccttccttccctacacatcaagcttgaggatttgcccccacccaggactggcaaattagctttactcaacatgtcccaagtcaggaaactaaaatacctcttagtctaaatagacactttcactggataggtagaggcctttcctatagggtctgagaaggccaccgcagtcatttcttcccttctgtcagacataattcctcagtttagccttcccacctctatacagtctgataacagaccagcctttattagtcaaatcagccaagcagtttttcaggctcttagtattcagtgaaatctttatatcccttatggtcctccgtcttcaggaaaagtagaacggactaaaggtcttttaaaaacacacctcaccaagctcagctaccaacttaaaaaggactggacaatacttttacgactttcctttctcagaagtcagacctgtcctcagaatgctacaaggtacagcccatttgagctcctgtatagacgctcctttttattaggccccagtctcattccagacaccagaccaacttagactgtgccccaaaaaaacttatcatccctattatcttctgtctagtcatactcctattcaccgttctcaactactcatacacgccctgctcttatttacactgccggtttacgctgtttctccaagccatcacagctgatatctcctggtgctatccccaaactgccactcttaactcttgaagtaaataaataatctttgctggcaggactgtgctgaatctccttaggcactctctaatcagatgtcctgagttgtcccaattcttagaccttttatacctgtttttctccttctcttattccatttagtttttcaattcatacaaaactgtatccaggccatcaccaataattctaaatgacaaatgttccttctaacaaccccacaatatcaccccttaccacaaaatcttccttcagcttaatctctcccactctaggttcccacaccgcccctaatcccgctgaagcagccctgagaaacatcgcccattatctctccataccacccccaaaaattttcgctgtcccaaaactttaccactatttagttttatttttcttattaatataagaagacaggaatgtcagccctctgagcccaagcaaagccatcatatcccctgtgacctgcacgtacacatccagatcgccggttcctgccttaactgatgacattccaccacaaaagaagtgaaaatggcctgttcctgccttaactgatgacattttcttgtgaaattccttctcctggctcatcctggctcaaaagctcccccattgagtaccttgtgacccccactcctgcccgccagagaacaacccccctttttcctttaccttcccaaatcctataaaaccgccccacccctgtctcccttggctgactttcttttcagactcagcccacctgcacccaggtgattaaaagctttattgctcacacaaagcctgtttggtggtctcttcacacggacgcgcatgaaatgtataatgctttgtcagctccaaatcataccctcaactttccattttacatctccgaaatctggatgtatcttagagtcgatgatgcaattataattggtagcttcctttctttatgttagtacataaaaataagggtgcatcctacaaatgatggcttctgagattagataaaatacctttctattagctctgtggttctctgcctgtgtattgccaggaggaaggaagtggagcatttcaggtgaggcacagggttttggtatcaattcctaagattcctttcatggtccagcccctggtgtgcattatcctacagttcctccctctatcgcaccctcagccacttggtgtgtctccttatttctgctcctcttgcctaccagcatgtgcctgatgactgaatcctgcccacccaaatgtcaagagcctaccagagatggcttattctcctccactctcctcagtgcatgtgggtatgtgtgtttggagatgactggaaaagcacagtggctacccattaaactgacttaggggtcacactagagaggaagaccatgaagaaaactgagttccagcctgacagcagaagggcagagctttctgggctactggctctaagggcaatgcatatatctgctgatttaaaataataataacaataatggctttgggtttccttaggttatcctccaacccaaagaaaccagtgggcagacatgtatacatggagtggactgggtcagctctttggcttcctagcatgttctgccatctctttttttctgatgacagaacaagcccttgcccacagggtaaaaacctgatgccagcctggccccctggagtccttctaggaccctggaagagagctgttctctttctctttgttttgttaattttaagctgcttccttgccatgcaaagagagaaagcccaagcaaagaccagcataggcagagagccggtagagcggcctgggtccttgtatcctgtgaagcatcacggttatccttctctgcacatgggccagtgcattcctgttctgcttaaacaagcttaagttgttccttcgagtcaatacaagataagatattttaaacctctctctactttaaactatccctctagcttagctgttctttttgaaagttatttgcaacaaacaattcaagtttgagatttgggagggcagaatgcccatattctgtgttgattgaaaggagattcctgggccttaggtccctgctttggttgagaagttgtgatgataattaaagagcctgcgtagattctcactagaggcagggctctgccttgagttgggtcggggtgccaacaggctgctctggatttatccgaagtccttatcagggtaccggatggggcattcaatgaagtttgcaccataaagccctaagaactccaggcttgaagattctctgcaaaaagtgttaccatagccagtcattttggtttgccataaccgataagggcttatctttctgacagcacttaccaacctagttcctctgatttttgagtcatgtcctagaaaaagagctgagcccaaggaactacagcttggaggatatatctgatctatctgcgatggcaggaaagcatgcatctagttgatctaaaaactagatggcattattgaggagttggacaggcggtcttaggaacaacctcgttttatactttttaaaaataggaatttacttaaaggcaacttccatctgctctcattctggcagaggtattgtgataaaggctttcaggaatgtcaacagctcaggattggcattagctcatagataattcccgtctactaaattaaagtctatgagagattgatgcatgcaccagagtcttgaattattaggcaaggatcttgctaaagctggacatgggaaggttgctatgaaactcatttcaaaggctgtgtaggccaactcacctctgggaaaccaacgcttattattaaaccaatgcaactgctcaaaaactaaaactccatcactatctaagttccccatcatggtgtgtgaaatcatttccagaaaactcttcaaaagataccgaataaaaggcatcacaggccgggcacggtggctcatgcctgtaatcccagcactttgggaggcccaggctggtggatcacctgaggtcaggagtttgagaccagcctggccagcatggtgaaaccccatctctactagaaaaatacaaaaattagccgggtgtggtggtgcgcacctgtaatcccagctacttgggaggctgagccaggagaacctggcaggcggaggttgcagtgagccgagatcacgccattgcactgcagcccaggtgacagagtgagactccatctcaaaaaaaataaataaataaaaataaaaataaaaaaagccatcacgaaaagacatttctttatcaggtcagcaaattgattgctggtttcaatctctcaagaagtcagattcttttcagacactcctttgtgtttctttacaatgtaatcagtcattccagggtcagctatgaggcacactcccctggcctccctcataagcaatttaattgcaaagggttagcatactatttcttctctgctattctcagaattctcaattatgaaaacaaaaacaataattaaaaagttcttccagctgattttttttttttttttttttttgagacagagtctcacttaaactctgctgcccaggctgtagtgcagtggtgcaatctctgctcactgcaacctctgcctcccacgttcaaccaattctgctgccttcccccctgatccccgagtagctgggattacaggtgtgcaccaccacgtccggctaacttttgtatttttagtagatggggtttcgccatgttggccaggctggtctcgaactcctgacctcaagtgatccgcccgcttaagcctcccaaagtgctgggattacaggcgtgagccactgcgcctagccccacgtgcatttttttttttaagggaggcaggaaagaaggcatttgggcctcttatctgcaattttcttccgtgtaaacttatgtgaaggatctggagtgggacttggtggcttcaagccctggctccacttcttgatggctgcgcgacctgggttaagtcacgcaacctctctgaaccctagtttattcatctgtaaacaggtcaataatagcacgagattcgcagcgcgagtggagctcaaagtgcagggttgtccctggtgaacctatcacttttatatttatcctttgatgaagccagtacaattcctacctggttaaccagatacatcccacctcttccctcgagttcgcccttccccccgcctcgtgaagtccttgttctcttagctgtcttgaaaatcctatgcatcagcatgtaggaaagggcgcgccaggcgggggaagccacccccgcccaagcgcctccggcttcccttataaagggagggcccccttcgcgaccgcaagcgcgcccaggaagaccacagagccgccggtgcgcagcgaggtggcgatacgcgcccgggctcggcctgcgggtggtggcccaagcgtccgcctcgctggcctggcaggcgcgactgtgcgtgcgcagccgagggtggtggcggccggcaccccacgccaagggtggtggtggccggcaccccaccctcggccgccgcctccgcgtgtcaggtgccgtgagaagcgcgggaggagcggccgcaggcagcgcccagggatatgactggagccgactttccagaagcggcgcacgcaaagcccagctccgcacgcaaaggggaggcgacagcagaaacttcaacccgataaagttcgccggagcgcggagattcgcctcctcctgccactctccgccccgctcgggtcccgccccgctagctcccccaggcccccccagtcgccccagcttggctccccgccctgcgccaacggcttccatcgcagcctgggcggccccgcgcccaccagcgggcggcgccacctggagtggcctctacgcgggaaatctcagggccagctgcgccccaggagcctttgtgtgcccaagcactgtcggggccccggggcgggggagcggctacttttagggattcctgatctcgccgcaagaactggaaaaaatttagcatgccaaagagcctccactgaggtggcaatttgtttgcgagaacctaagataaaatttaaacaaccaaccaggggcgctgtgaggcaaaccgctgccactacactggctttccgggaagcaagctcaagtcgcggagagggaagggaggtcgtgcgctcggggcggggcgcgctcccaagtcgagcgcagcggccggggcaggttgtaccgagcgtggttctggggacaccgtgcggcctcgattggaggtggctgtgatgaagcgcggttaccgcacaatggaaacgtgggcacctccgctcccatgaaagcctgctggtagagctccgaggccggccggtgcgcctggacgggagtccgggtcaaagcggcctggtgtgcggcgcgccccgccccccgcaggccccgccctgccaggtcgcgctgccctccttctacccagtccttaaaacccggaggagcgggatggcgcgctttgactctggagtgggagtgggagcgagcgcttctgcgactccagttgtgagagccgcaagggcatgggaattgacgccactcaccgacccccagtctcaatctcaacgctgtgaggaaacctcgactttgccaggtccccaagggcagcggggctcggcgagcgaggcacccttctccgtccccatcccaatccaagcgctcctggcactgacgacgccaagagactcgagtgggagttaaagcttccagtgagggcagcaggtgtccaggccgggctgcgggttcctgttgacgtcttgccctaggcaaaggtcccagttccttctcggagccggctgtcccgcgccactggaaaccgcacctccccgcaggtcagtctgtctgccgaggcgctgcccggcgacctcttcagatggattattacaggtagcgggtggcgtggtaggtactttaaaggaaatcaagcgccaccgcctcgatgcccgcagcgttgtccccagattgcaggaaccgttacgcgccttgcggggaggggaagggtttggcgctgggttacagcgaggtggaaacacgccccttctcttctccaagggagagtgggttggggatgggaaggggcgtcttcggccatttctccagagagtcagctccgacctctccacccaacggcactcagtccccagaggctggggtaggggcgtggggcgcccgctcctgtctctgcacccctgagtgtcacgccttctcctctctgtccccagcatgggcaccagcctcagcccgaacgacccttggccgctaaacccgctgtccatccagcagaccacgctcctgctactcctgtcggtgctggccactgtgcatgtgggccagcggctgctgaggcaacggaggcggcagctccggtccgcgcccccgggcccgtttgcgtggccactgatcggaaacgcggcggcggtgggccaggcggctcacctctcgttcgctcgcctggcgcggcgctacggcgacgttttccagatccgcctgggcagctgccccatagtggtgctgaatggcgagcgcgccatccaccaggccctggtgcagcagggctcggccttcgccgaccggccggccttcgcctccttccgtgtggtgtccggcggccgcagcatggctttcggccactactcggagcactggaaggtgcagcggcgcgcagcccacagcatgatgcgcaacttcttcacgcgccagccgcgcagccgccaagtcctcgagggccacgtgctgagcgaggcgcgcgagctggtggcgctgctggtgcgcggcagcgcggacggcgccttcctcgacccgaggccgctgaccgtcgtggccgtggccaacgtcatgagtgccgtgtgtttcggctgccgctacagccacgacgaccccgagttccgtgagctgctcagccacaacgaagagttcgggcgcacggtgggcgcgggcagcctggtggacgtgatgccctggctgcagtacttccccaacccggtgcgcaccgttttccgcgaattcgagcagctcaaccgcaacttcagcaacttcatcctggacaagttcttgaggcactgcgaaagccttcggcccggggccgccccccgcgacatgatggacgcctttatcctctctgcggaaaagaaggcggccggggactcgcacggtggtggcgcgcggctggatttggagaacgtaccggccactatcactgacatcttcggcgccagccaggacaccctgtccaccgcgctgcagtggctgctcctcctcttcaccaggtaaagcctctgggaggcgtgggccaggtcttttctcctctgaaaaaggcggagtagagacagaatatgctgagtttgcaagcagggccccgggtttggggtttcgctccaggtccccacccctcaaaaccaagatcgcgtcggtaaagggactcacagtgagggctgcgacacgcgcacgcgccccacccagcggtgccccgacccctccggtctcctatcttgtctctatcgtcccctcccctgcttgcgagtgagaacacatttgcaaagacccctccaccccccggaaaaacaagagtttttaaatgcttggagatgagccctgatatctctctccctggcgcattacaatcagaactggaatagttccgaaagaaaaggtaatgtcataaatatgttaaacacagcagcctctcctaggctagtcctcggcgtgcatccgaggccgcccagccctggcgctaaaagcgggccgcccgtcagggctttgttccaggccaaggaagcccatggaggccgggccagccgacaggtaacccgcacagaaactttcagaaggcggccacaactagcgggcagcgctaggtttataaaacctccgcgctaggagtttgagaaatgccggggtagaagacaagaagcagtcacttttacgaaagcagagtagcattcagaaaggcagatgggatatccaggaggcgcctgcagacgtttctggcccctgcgcttggctcagttagcggaccccctgatgcccacgttggtctctactaagcacggattcaacaggtccctggtgtcgggttgccagatttggcaaaagaaaagtaagttttacacgggaatactcacactaaaagattagcccttgttgatctgaaatccatatttaactgggcggcctgtagtatttactgtggaaacactatccctaggggcaaatgtttcgcaaggcaaattttgattgccgaagagaccagaaatcctggttttgtgtcatttcttggagcacaagtgagcagttggagatgctgaatctgcaggcgccacagaaaggtgtttggaaggcagagaatgactctttccttattaaaatccactgcaatctatatttccttagatactgtacagctaccttcacaaattaaaagtttctgtatacttaaaatggctttttagtattaaaatcatagaaacacccatggtgggtgagggagaggcagaaatcgaataaagaaaagtcaaccagagatcagggaaaaggaaatcccggaataggttccataggtttttgtgcatccgcagataggcattttaacttttgaaacggcctttgtttttcattagaaccacaatagttctccgagtactccaattaggcggcaaaaagaaataaaacaatttggaggtcactttcaattcaatatgctgatactttttttttcctttttagtgaaaagacgtatgacagggcttggcaaattacacgatctgtttttgtatatacgttttattgacgcagtcatgcccattcatttatacattgtcgatggctgcgttcactctacaacacaaggcagagcagagtagtgcaacaaagagggtttggtccacaaagtctaaaatagatactctctggctctccccaccatacatgtttctatgaaaaaagttggcagactcctgcaatataatgttgaagaagcgattctaaaaataactccacttcatcacatacgtgtatacattttttttcggagttgcaaacaatcagttacttgttttttgacttctaacactttgactcaaggtagtggacatttctaatcttttaatatttattttggtaatttttgatggctatatagtattttgctatgataatgtatagttatatataatcatttattgaactttaatgttggtcattggccttgattgcatttttaaaatttttattttaattttatgtatttacttaccttagagacagggtctcactaccttacccaggctggtcccaaactcctgggctcaagcagttctcccgccgctgtctggcaggtagctggggctacaggcgtgtaccaccatgcctggctaatttttagaattttaggtcctgttgtggttacatatttttgtatctcttaaattattttctgaaaatacatttctaggcatggattactgggtttaaaatgaggcgggaagaggttaccttcatgtctcttgcctcgtattaagattttgttttttaaaaagattgtatcagtttgtatcatcaacagtgaataagtactacagtttgtaccataattttatgaacattgggtatttgctttcaaatttaaaaaatacagtatgtagctttatccatcaggacaccaattatctttgtataaaatgagaacagcatgtctgttggaattgtccagggaaatgagggagaaaaaaaatttactttcacattgtaactttcgtgggccctgggtgcttttgcctttgtagattccttatactataaaaaaattaaaaattaaatttcatgactaccctgatataaagatgaatgcattaaaatgatgtatgaaaatattttcttctaactaaaagtgagtttttttaggtctgaagattgtaaaagacgtaaaaatattttcatgggcccctaaaaagtgttgtgagccctaggcactgtccctgcggtacccaatggaaaagtcagccttatctactattgtgctttttgaggctgggaaaacttaagagttttttgacttataatgggaaagacagcattagtcatgcaaggcctattacaggaaatataattcttaaagtccatcttgtaatttagtgagaaattaggaagctgttttagatttttttcccagaaatattaatttagtcactgagctagatagcctatttaagaaaaagtggaattaaaataaattataatgtgctttctagatgaaataagaattttgctcacttgcttttctctctccacattaaacaccaaacaggtatcctgatgtgcagactcgagtgcaggcagaattggatcaggtcgtggggagggaccgtctgccttgtatgggtgaccagcccaacctgccctatgtcctggccttcctttatgaagccatgcgcttctccagctttgtgcctgtcactattcctcatgccaccactgccaacacctctgtcttgggctaccacattcccaaggacactgtggtttttgtcaaccagtggtctgtgaatcatgacccagtgaagtggcctaacccggagaactttgatccagctcgattcttggacaaggatggcctcatcaacaaggacctgaccagcagagtgatgattttttcagtgggcaaaaggcggtgcattggcgaagaactttctaagatgcagctttttctcttcatctccatcctggctcaccagtgcgatttcagggccaacccaaatgagcctgcgaaaatgaatttcagttatggtctaaccattaaacccaagtcatttaaagtcaatgtcactctcagagagtccatggagctccttgatagtgctgtccaaaatttacaagccaaggaaacttgccaataagaagcaagaggcaagctgaaattttagaaatattcacatcttcggagatgaggagtaaaattcagtttttttccagttcctcttttgtgctgcttctcaattagcgtttaaggtgagcataaatcaactgtccatcaggtgaggtgtgctccatacccagcggttcttcatgagtagtgggctatgcaggagcttctgggagatttttttgagtcaaagacttaaagggcccaatgaattattatatacatactgcatcttggttatttctgaaggtagcattctttggagttaaaatgcacatatagacacatacacccaaacacttacaccaaactactgaatgaagcagtattttggtaaccaggccatttttggtgggaatccaagattggtctcccatatgcagaaatagacaaaaagtatattaaacaaagtttcagagtatattgttgaagagacagagacaagtaatttcagtgtaaagtgtgtgattgaaggtgataagggaaaagataaagaccagaaattcccttttcaccttttcaggaaaataacttagactctagtatttatgggtggatttatccttttgccttctggtatacttccttacttttaaggataaatcataaagtcagttgctcaaaaagaaatcaatagttgaattagtgagtatagtggggttccatgagttatcatgaattttaaagtatgcattattaaattgtaaaactccaaggtgatgttgtacctcttttgcttgccaaagtacagaatttgaattatcagcaaagaaaaaaaaaaaagccagccaagctttaaattatgtgaccataatgtactgatttcagtaagtctcataggttaaaaaaaaaagtcaccaaatagtgtgaaatatattacttaactgtccgtaagcagtatattagtattatcttgttcaggaaaaggttgaataatatatgccttgtataatattgaaaattgaaaagtacaactaacgcaaccaagtgtgctaaaaatgagcttgattaaatcaaccacctatttttgacatggaaatgaagcagggtttcttttcttcactcaaattttggcgaatctcaaaattagatcctaagatgtgttcttatttttataacatctttattgaaattctatttataatacagaatcttgttttgaaaataacctaattaatatattaaaattccaaattcatggcatgcttaaattttaactaaattttaaagccattctgattattgagttccagttgaagttagtggaaatctgaacattctcctgtggaaggcagagaaatctaagctgtgtctgcccaatgaataatggaaaatgccatgaattacctggatgttctttttacgaggtgacaagagttggggacagaactcccattacaactgaccaagtttctcttctagatgattttttgaaagttaacattaatgcctgctttttggaaagtcagaatcagaagatagtcttggaagctgtttggaaaagacagtggagatgaggtcagttgtgttttttaagatggcaattactttggtagctgggaaagcataaagctcaaatgaaatgtatgcattcacatttagaaaagtgaattgaagtttcaagttttaaagttcattgcaattaaacttccaaagaaagttctacagtgtcctaagtgctaagtgcttattacattttattaagctttttggaatctttgtaccaaaattttaaaaaagggagtttttgatagttgtgtgtatgtgtgtgtggggtggggggatggtaagagaaaagagagaaacactgaaaagaaggaaagatggttaaacattttcccactcattctgaattaattaatttggagcacaaaattcaaagcatggacatttagaagaaagatgtttggcgtagcagagttaaatctcaaataggctattaaaaaagtctacaacatagcagatctgttttgtggtttggaatattaaaaaacttcatgtaattttattttaaaatttcatagctgtacttcttgaatataaaaaatcatgccagtatttttaaaggcattagagtcaactacacaaagcaggcttgcccagtacatttaaattttttggcacttgccattccaaaatattatgccccaccaaggctgagacagtgaatttgggctgctgtagcctatttttttagattgagaaatgtgtagctgcaaaaataatcatgaaccaatctggatgcctcattatgtcaaccaggtccagatgtgctataatctgtttttacgtatgtaggcccagtcgtcatcagatgcttgcggcaaaaggaaagctgtgtttatatggaagaaagtaaggtgcttggagtttacctggcttatttaatatgcttataacctagttaaagaaaggaaaagaaaacaaaaaacgaatgaaaataactgaatttggaggctggagtaatcagattactgctttaatcagaaaccctcattgtgtttctaccggagagagaatgtatttgctgacaaccattaaagtcagaagttttactccaggttattgcaataaagtataatgtttattaaatgcttcatttgtatgtcaaagctttgactctataagcaaattgcttttttccaaaacaaaaagatgtctcaggtttgttttgtgaattttctaaaagctttcatgtcccagaacttagcctttacctgtgaagtgttactacagccttaatattttcctagtagatctatattagatcaaatagttgcatagcagtatatgttaatttgtgtgtttttagctgtgacacaactgtgtgattaaaaggtatactttagtagacatttataactcaaggataccttcttatttaatcttttcttatttttgtactttatcatgaatgcttttagtgtgtgcataatagctacagtgcatagttgtagacaaagtacattctggggaaacaacatttatatgtagcctttactgtttgatataccaaattaaaaaaaaattgtatctcattacttatactgggacaccattaccaaaataataaaaatcactttcataatcttgttatgaagttttatgttgtagcaaatatagtctaatgtatcactttatttcaactattactatggattattcaattaaaatattgcactgtaaacattttatttgtccattctacatttcaggccgaggccacatgcttttttttcccgtaggttttcatcaaccaaatttctaatctctatatttttgaatttctaagaaccaacacggaggttacatttcaatcaaacaatcaagccaaatgagaattaatttgcaatgttgaaagattgaatagattgcgactttaagttgctgatcgatttctgcttcatctaaagaatgcagtacacatttttcttcctcagcctcataccagtcctttctctgagtattttcttctttcatttttttaaaggtacatgtgcctcaattagtgcaattaatgtccaataaaataagatgggtacaagtattctgtcatgtactatgtggaaatgttttattgccaatctttttacttggtaaaaatacttgacttcacagggcctaggtcatgactctccaggccttcactgtgccacactcacagatgacagggcttgcggtaccaaaggctctttatcttccagactacagctcctattaatg

SEQ ID NO: 6 - DNA, 102713 bp, Homo sapiens
ctcagtggcggagcgcggctgccggtgtgcggccgggagcgatcgccgcggggcaggggcgcggcgggcaccgcgcagagcgcgcagaacagacggacggcggcggggacccgacggcggcgcctcggcactccccagactccggccagcgcccccctgccagccgcaagcacccagccccggcccaccccgggctctcgatggcccccgaggccggggcgaccctgcgcgcgccgcgccggctgtcctgggcggcgctgctgctcttggccgcgctgctccccgtcgcctcctcggcggcggcctcaggtacgcgccgcgcccgggcccccggcgctcctcagctccccgcgcaccctcctgcgctcgggccccgtcgtcccgctcagtgctggctacgggtcgtgtcactagcctgtgcgtcctcgtcactcgcgggtcggggcacttggcgccctgtgtgggtggcgggagcggggacgcctcggtgcccggggaccgcagcgcgctggcgtttaactttgccgtcgcccgccttggagtcgggaggctccagccgtctaagtgtcccgggagattcaggcacagcggggaaaaaaggaaaagaaaggcgactttcagcgtgcggactggggtaatgcctttctttgcccagaatttctcgggagcgtaggtggtcatcctactttctccgcgttcacctctcgcgaggcaggatgacgggcgcactcgggagaccggagggaggcagagcagggctgttctagaaggtcgtgggggaaaggctgcgagctgccgcagggcgtcgggtgcctctgcgctccagaggagaagcgctccagtgccagctcggctccaggcggcaggaggcccgcgcgcccggggggaacgttcaagctgggagaaaatgtttgtcttgagaggagggagagggaaatgagaaagctgattccagagaaactcgcccttccccaatggctgaggctgcagccaggatggatgcttcctttgagagcaatgcttttcagaaaatgctagcgcgctcctgtcagatttcttgcaagcttcctgcagagagagacaagtttgtggcgaggttttcattcctaagcctttggcggcccttgttaccacctcctttgcaggcatttttacacttgaaactggcttttaggttattggtttgtagaaatccaagaagcagacaatgatcgtcagatactattccaacgagggtaccagttttatgatgctatttagtgtatatattgttctcttacttcaggggtaaaggaagaaaagttggggatcacattactttgtgactttttggtagatacatcatcccaatgcttggctcaggtttatgcgaggtattctgatgccaatgccactttctcataaaaggcagtgcctgccgtagggtctttttcttcccattagtgaactctaggaaagtattcactgaatactttgcacagtacttgagaggaataaaactaaataaagtcttccaacttccccacctacaactcctggcttttgtttttctaagtgaaaattttcagagtgctggaagagtttttgtttctgaaaatgatctgaaactggaaccagtgctgccctggctttgtggcgattccagccttctgcttttccgattcctctgccacctgcccgtgggttgcatgtgagtgggtccgagcggggttgtttgtgagagctcctggaatcccaccgcgatctgcactcttgctttttcgccttctgctctgtgaatcactgtgctgaggaatgctggggctggacagcttcccagcccttctctctactgtgttgacgtgggatctacagtcaaatgatgaccagactagaggtggacaaaggaggacaggcacatttcagaatgaaatctactaaatttaaattaagtaatagaaggatagaaacagacatagcaacctgtagatagctccccatgctgtggatgaaattatggggtacataacttctttcatgggctccctttgacagcaacgtcatggatagactgctccctctctctggttgaactaatgcatggaccaagcgagctgcttgtgtcaagctctccccttcaccacccttttggggccagaatctctgtaaggaaattacccacggccacataatagtggctccgagggactttgcttaaagcaggacacactgaagatctggataagcccttcagtgtagggtcaattaaacataaaacaaaataagcaagcagtgtcccctcctccactcatattcatccctacaataggatactatgcaaacattaaaattatgatggccttgccagtctggtatgatacatttttctaaacacatgtggatgtactcacacatgcacatatttgcagtgggtatcttaggatggttagggatgatttttattttcttctttaaagaagcttttagggaattttccatgtcaaaactattttcaaagtaatactaagattactaagatgctattttcctttttcacagttgacatttgcactgagggtgcaaaagcttgatgggtaaactgcgggtgtcttactgagaatcaaggcagggacatcaccatgcactagtagtctttgaattttggggggactttgcagttaaaaaaaatttgccagtttcattaagaatgttcttgatgccacagtaaaattattaattttaccaaatctttgtatctttgagtgtatgtctttttaatagtgtaaataaatgggaaggacacataagttactactgctgatgaccaagttcagtggcaaccccagggggaagcactggtgtgattgtttgtgttatgcattaagctagctggttttttaaaatggaatgtggtatttaccacaaagaatgacaacagacaaactagagctattctgacttgggtatttggccgatgttttctcaaaaatgaacaaagggaacttgctacttctagtaaaataactgctattattgcttgccaatgataacatttcagctttcaagtgaaaatcagaattttgccaagttgtttccaccactgtaagcttgaaagtttcccaatatttaaatttttttctagtgagatcaatggtgatataaatgaatgtgatttgtaaatgtcatctcataaaatgtgtcaacatttggatgatctgcataaccaaataaaccaatagatccaaatgaccagtgtatagccttacaacaatcttgcatgggtaaaaggtctgttcaaagtgcatgatagcccaatggatttttaatgtaacaaaatatgaaaaattcttcatatgatttcagattctaagaattggctacttgatgaattttggtgtaatatcaaagatttttcaaaattatccaaaaaggctattgaaatagttgtccagctacacatctgtgtgaggctgggttttctccaagcaaaacgacatattgcaatagattgaatgcataagcagatcggagatattctattaaaaagatttgccaaaatgtagaaacaaagctgctcttctcactcatttctctttgttttgggaaacagttacttttcatataaatatatttgtatgtcaacatgtaatggtttattattgttttttaaaataaataagtacatattttcgttttaattcccagtaaagtcaataaggatagataaaactcacagaaacataacctccttggcatcctcgtaaatttaagaatagaagataattcagacaccaaaatgtttgagacacactggtatatacggagggaagtaggttaaaaatcaggatgcctgggtgtgagtggcagtgctgtcctgcacctctgggggccttgggctagtctccgcgcttcagaataggtcaattgaaggaggctccttccatctctggaagcctttagaagctcgcctgtggctcaacctgcatgtggctttatggggtttccctgttacttcagtcctctttgagagaacgtggtgagaccctctctccttttttgtgcactggcacccgccaatggcagatggaagagctgttttgttcatcaactgatcatgaaatttattcctgtggaatcagaggttgtaataggattgcagagtgacaatttgcacccctggaaagttatcaccagacagttccagagcatgatgaatatactctaccaagaccattcacatcatacttaagttctaaaggcccgttccctgaaaacaggaggggaaggagagtgtattcatttcctattgctataacaaattgccacacacttaatgacttgaaacaatacaaatttatgatctttattatagttatagagatcagaagtctgaaatgtgcggtactgggcaaaaatcaaggcctgcattgaaactttaagggagaatctatttccatgctctttttaccttctagaggtgcccacatccttggttctcgggattaggacaaggacatctttgggggatcattattcttcctacctcaagggatgaggggggcagggagcctggaagcaaacatttcgggagaggctccatcacccttggctgattaaggagcagacctcttttcattggccccccatggaacttagggatttcttgagttataattaaactgttatcagaagctattatttcagttaaaaaatagaggtatttaaaggtataaaagtaaaggagagaaaggactatgtatgtgtatgtatttacttgtaactgcacagaacgtttctgttagaatacccatgaaactacaaactttggtgcctttgggatggagagctgggtcgctgggggacagtggtggatactgtttcatccatctcttttaccaacttttgtagatgtatgttagaacatttggaatcagggaggtatgtgaattggttattcacattcgtgagcaccccgttttcctccctcctaaaagttatccttgcttatgaaaaacctgcgtcttcctccctcggcccggcctgggcagcgcttgcgctctgaggcccttagagggcgctcctggacttctggagccgaagccaccacccgcaggcccttccgtgcagccctagttggacttagctgtcgctgcggctttatagagataagaaaattaggacaaacatccagttatctgccttgtttctcccttagtgcttgccttttggcaatttttctactcattggcgctttcttcatatattaaatgggaaaggacagatcactaattaagagtcgaaatggctgcgtgttagcaaattcaaataagcactgatgagaaaggaaattgcctagacctgcagctggggtcagaagcccgctggctgttggggtgccgctggtgcctctgcaggcctccaccaaagatgcagcagctggaagatggggtgagagcaagggatgtctcaggggtaccagcctcaggaactgcctccttggccctgatgggtcccgtctcagcctctcccttccaccaccaatgttaatttttgtatccagagaggataatattacaattataatgtcaaattattataattatatactatgtattctaattattataataatgctacacttgtagcaaaataacttgagaggtgttcatgttaattacaaagtagatgctgctcacattttttttaccgcagtctcctacatgtggacgaaatgatttaattatggcatccttataatctataaagtacaatctacataattctattttcagttttatgaggaattcctaggtgtacatttttacttccttttaataataactggcagtttaaagtgttacggagttcaccatttctctctgttatttaatttaattttcacagtgaccttacgaagtcagtaacatcctcatcttgctactggggcagctgaggtcagagaggttaactggttttccctaagtctgtaatctaatactcagtctttgcggtccagatcccacactctccctgcagacacccctgttctggttggtttgagcttttactgtatctccttgttttcttctctaggctggatgtgagtgccaacactcacatctttgatctgctcagaatgccttcctgagtttacttctgtaacattgctgtcggctgttgaaaaatgattatgtgaggtactgaaatgtgttgaactccaacaaggctaaacttaagacaaagtggcagtgaatgtagcctctgttacaagatggatttggcctgtggatgtgagcagggtcctcactgtggggaagccccctttccttggtggtcctgttaagctcgcctgttggcatcttagagccggtgctcggtgtctaacctgttacccaaactctttgctactctctgtgagtgcttgatctttaccgtggaaatcacaactttgaacctttgagactgtatttaaccagaaggctcccggaagtgctaccaccttgtgctaagacactcagttttgtttactggaccatttaagtcaaggaaaaatgctgagaaacattagtggctaatctatatggttgacaagtccctacatctcacagaggtggtgaggctgatgctcacagcgttaaagtgtcttgaacttctcaggagaaatgtgccatttaaatgctgggctctgctatttagggactgttttatggtgtcacgtcccttcatctggtttattaggtcctaattgagccaccaatttggctgtgtgaccttgggtgggtcataactcttcaggcctcagttttctcatcagcaaagcaaggggattgacctagatattgtgaagggccccccagctctaactttgtgtgagtctccatttgaaggaggtccattcattcattcattcatccattcagcaagggttactgggagtcagacaaagacacaaagtcagatgaacatagtgcctgctgtcagaggacacacaggcaaggagggctggatgaggataatacagacaggtgatacgtgctaggacagaggtagcacaggtgttttgagggtgaattgactgggaggtcaaggccagctatatttgagcccttttgagaaggacataggcattagttggagaaagatgctgaggaaggacatctctggtcgaggaacagaccctgctgcacacgtgaagtcatgtgcaaggaaccaggaatattcgaggtggttcgtgctaagtgctgctctgggtcaatggtggcattcggggttggaggtgtaggaggcacccagctcaggaaagtcctggggtctgaccttgatccatagtgttggtggccaccgagggagtgccataaggtggcatgtcgctgggtcagtgggaggtcaggtagcagccaatcccagtactgcatgaggctctggccagaaagggccattgaggcttttgttcattgtttggggcttcttctatatttgcttatttgtttggggccttcttcatgccaatatagaccaaatgcctatattgtatcgcctccagtcatatctcatttgaagaatcatctttgtttcatgttttctgaaatggctcgtatgttccagaacagtcttattttggaaagggctccagggtagcataagtctcatgtatttacatgtgggcagtctggtaggattgatttatagtgcgggtcttgaacagttgagtatgttggctttggggccaggggtgggtctgtgccaaattcagtgtggttcccaaggaaagaccctgtgcaattttaggagttcatgggcggggagtggtaagtaacttggcttaaagaggaaataaatggacacagtttactgagactttcactaagtctgcaaacagagtggagatgagcatgtgccactcttgaagaagtgtggatagcgggtaccttaagccctagtgctgtggctggagttagctagcattttaataaagtacctgagaaagctgtgcggtgatgtctcctaatttttcatgatcccacatttgtctggagatgaagtctcatccacagtcacccatggcggaactcacggggctggatggggtgtggcaggtgtggtcaggtgtggtgtcctaggagctcaggagaagcctccctagccaggcaggggagggcaggacctggggcaggtgggctcactgtgagccccttctgaagaatcaggagaagctgcttttgacaaaagctctgtgaaatttatgggtgctctgggggatggtggggaaaactgccatggtggcacagaatcacatatacaataaaatccccctgcagagaaggctcggcctcctctgatggatgtgtgctcgtgatgacgcatcagtcacacttagaggacagaaagctcaggagtgcccttcacagagtagctggtgtggctgtgtttactttagtggagtgtcgtggggtgctttcaacgatcatttcttatggccaattctggtgtgcccattcccccgcagacataaaggtcggtggtttggacttcaccctaggcttaaatgctatttttcaaaaaatgttttaaaaaagttttaattttgagatagtcatagattcctgttcaattataagaaggatgaatgttgtcagaatcaaaatggagtcacttatgctaaaacccctgacaaacagagccatgaaaggccagcaggggaggattctatgcacgaatgcctgataacaagagctctcagcaaagactacaaaaattacaagcctgccaaaggccatgacaacctgacgtctgcccagcaacttcctgtccatcctcagactggcactatcctcttcattgatccttgtagccaaggataatgaactcaagacaattgctatcttccttattttcgctttaaaagcctttgtcttcctttcactccctgagtatgcgtatagttcaccgtggcatacaaattcccattgcaatacatactcctaaatcaacatcattttctcttggagtctccctctctgttgtttaggttgacagcagtaaggtggacgtaccatgtaccctccacctagtttcccctaaaggcggcatttgcatagctgtagtgccgcatcccagccaggacagtgaagatgcagaagagttctctgagaaggcccctgtgctacctaatgtagccatatttaccttccttcctcccatccaccccagacacaaatctgttcccccattttataattttgtcattttaagaatgtcatataaatgccgttctacagtatgtcaccttttgagattgtccaaagactatttttaaaagtgttttgcccattctgcttgtgatcactgcagttagcttgcaagtgtttttctttttttttttttgtaaatggagaaatcatggcatgcaatttggcatctcagggaagtgcggctaccaccctggtccaagccgtattacctggatttttgcagtgacctctccatagtctcactgctcctgtcctctcccgcaacattccagtctcaggacagcagctgcagcaattctcgtgatgcacaatgtcacagaaccttccaatagctccctgactccctcagatacaaaccagagtcccaacaagttttccagactgtgcatgatcctttccacaccacgccctccctcaccgtctgccatctgctttggcctccggcctcctggctggttctgcaatgtacgaggcctcttccagccttagggcttttgcgctggccgttccttttgcctgagcaaccttccatgaacatcagtgggttgatagctgggtgcagtggctcatgtctataatcccagcactttgggaagccaaggcgggcagatcacctgcctgaggtcaggagatcgagaccagcctggccaaaatggtgaaaccctgtctctactaaacaaaaattagccaggcatggtggcagacgcctgtagtcccagctactcaagaggctgaggcaagagaatcgcttgaacccaggaggcggaggctgcagtgagccaagattgggccactgcactccagcctgggtgacagagcaagactctgtctcaaacaaaaacaaaaacaaaaacaatctatgggttgatgcctcatcctcttcaggttctttgtgcaacatcttctcaagaggccttctggacttctccctgcctttaacagggtaatcctatccttacccccagcacatcttatcactgccttattttgctccacgccctcatcaacacccggcatttcatatattttactggcttacttgatatttggctatcttcctttgctggaatgtaagctccacgagggcaggacattgtgttggttttattccctgctatagcctccgtgtctagaatgctgcccttaaatagcagaggctcagtgactgcttactaaatgactggatgtgctttctttggtattagttacatatgatatacctaaatatatttatgtatgttgaccggcctccagcagaataagggggtggtgccgagtgtgggacagtgccctgcttccctcccagcctaactgtgtggtgtcagcatatgcgttagtgagagagttgctttgtgttggaagtccattttcagttggagagaagaattgtatttacacagtatgtgagtgtcctagggctgctgtaataaaataccacaaactgagtggctttaaacaacagaaatgtattatcttgcagctccggagctggaagtctggaatctgtagggccagtcatgctctcttggaaggccctggcagagagcctatccttgcttcttcctagcttcttgtggtttccttggcttttagacacatcagtccaacctctgcctccacgtcatatggcattctccctgcgtcttctcttgtaaagacaccggtcatatgggattagttttggccatcttaactctgtaagactgtatttccaaaatttcccaataaggtcacattcacaaataccaggggttagaatttcaatatatttttggaagggatacaatttaactcataacgtgtggtgtgcttaccaacatgattccttttctttttttaatttttaatttaattttaagtttaagttccagggtacatgtgcaggatgtgcaggtttgttacataggtaaatgtgtgccatggtggtttgcagcacctgtcaacccatcacctaggtattaagcctggcatgcattagttatttttcctgatgctctgccccaaccccctgtcctcccctgacaggccccagtgtgtgctgttcccctccctgtgtccatgtgttcttattgttcagctcctacttataagtgagaacatgcagtgtttggttttctgttcctgtattagtttgctgaggataatggcttccagcattatccaagtccctgtaaaggacatgatctcattccttcttatggctgcatagtactccatggtgtatatgtcccgcattttaaaatccagtctatcactgatgtgatagactgggttgatttcatgtctgctgttgtgaatagtgctgcaatgaacatacgtgtgcatgtatctttataatagaattatttatattcttttggatatagacccagtaattaggttgctgggtcaaatggtatttccagttttaaatctttgagaaatcaccacactatcttccacaatggttgaactaatttacattcccatcaacaatgtaaaaacgttcctatttctccataacctcgacagcatctgttgtttcttgacttcttaataatcgccattctgactggcatgagatggtatctcattgtggttttgacttgcatttctctaatgatcagtgatgattccttttcagtaggcaaaagagttcatcagcttctagcactgggccacagctcagatgaggaagggataagcccctgagatgcattgtgtgctgaactgtcaacctggtgttccaaagacctatggacattcaagtggtcttaattatttgatcaagcctggctaggtccttcactgatagattaaataataagtaattaactcacatcttctgcgggcagggcactgtgctaggctctggggttacaaagatttagtaataaagaagttgggattgctgtggccataaatgacaaccaaatatgataaatgtagcaatataggatcatcttggactttctaataaacttccgcttgccagatgtagtgtttttacattgaaacatacagaactgtaagatcaggaagagaaaccaccaactatgtctgaggaccttgcctggcgggcacactttggtgttgactcaatctgaaactcaaaaaatcagtactttttttcctattctgtaaaatttggaatgtgcctttctctttttttctgtctagattgtattttctaattgagacttccaggtcatgagatgaaggcagtcttgttctaccacagacagtccatgggccgtggatctgacagcctttgaccttcttgatgatatggaaaaccatcacgttctcttttcctgtaacatgtgccctggctccagtctgttttttaataccactttccactccacccatcaatttccttctactgctctctgatagcctgggagaattgaagcatcttgttttggctaataattctcagaatccacatatgtacctgctgatattcaaacaaaccacacccaaaggatgtgaggccttggggtgatcttattttcacagctgcatcatgactgcactttcaatgctagcacctagggaggctgaggttcagggtacaaacactagatatcatctgagcagattgtgtgtccctcttaacaagcatgcggaatctgacttggggtccttgggatgagttccgtggggtccactggcactctgaaattgtaatgtagtttcattacaggaaacaattctcagcattttgaggagtcaaagataggctaggtcacagccacagagagggacagactatgtgtcctcttggaattcaagccctggaaagcagtgagtgacccagggcttccacacatggggaaaatctctagtaaaagcgctctttgaattccattaatgccatactctgttctctgattatcctagctttgggaggacttcctttcccctgggccctgataatgtttcttgttagtggcactcagctgatagtaaatgcctgataccctcactctttcatgtgccaatgtagtgcttccttcagtagattgaagcccattgcctttcttacatatctccaaattaattcacttgtattcccaggggagtggctttcttagtaactctatgtcacccaattgaatagcatattcaaagatgtttacctttgaaggtagggaaatgtgttggaatttgcctgggtctgtccagtcatggaaatcactgaagactattttggatttacaatcaataggcagatggaagaggagaagctgaatcagattatctaagtttcctttcaactgtcaagatttaaaaattccaattaaaagtatgttttccaagatggaaggaaatgaggaccaaatgccagctctgctgtgtgcggagggagaattggccaagagctgagatactgggaatcaggctgggtcattttgtaccaggttgtgattggggatatcaggtgttctgtggcatttattcctcatgttgatgttatctcacatgtgtggagtgttttatgattttctttcatattttattcttgcatcaatcctatgaggtaggtaggattagctacattcatagaaaaatggactaagtttgatatttgtagagagaaacttgagtggcatatttgctttctttgagggccttgaatggtggtggacactctctttcaagaggagaaaaatgggttcttttcagccttgacttgacttgacattgggggacattcccttcttcctgaaaatctctcctgcttccatgatgcaacttttttctggttctcctaccactaaaatttcagatttaaactgtcatccctcagacctctgcgttctttgggtggagatgtcaagtagacagttggacacactggagctcagaggggaagccaggctggagttgggaattcaggagccttccacatatggatggtctttgcagtcatagcaccaggtgtgctacatgggtagagaaggaaggagtgcagtagagaagagggaaagccagagctgggctctgcagtgctctaccatttagagttctggcagaggaggaggagctggcaaaggggaccaagacggggtgaccaatgatgtggaagagaaaccagggagtgtggcatcccagaagctagtctagtggtcagggaggacctgagaagacttgcttctaggaggaggcgctcactgttgtcggacatagagtaagctgaggagcaagagatgaagatttggcagcatgaaatcttgcgttcacaagatccattcagggcacgagctcatgtgtccttatgaattcagctgccaccactggctttcagttttatatctttggttctgatttatctctgggtttatacttattgcttttaattataattacagctgagagggaacaaagtatagtagaaagagcatggtccatagtttcagatgggtctgagcttgactgtcacttactagatgtgtgcccttgggcaaatcacttaactctctgtgactcagtttccttatttataaaaatgcgaacaccaaagtgcagtgcacaggctttgaaatggggatcaaagagaaaatagttatgataacacagctcattttaaatcacttctatattgccagttccttgcttagaatctgacacatagtaggcactcagtaaatctctgttccataaatgaatgaaatggctggcactaagtaggtggtcagcaaatgttcctttcctttcttttttacttccttaaatatttttttctatattacaaacggatccaaaacttaaactcttagtttattaggtgtgtagtgtattttcccctttttattgataatttacctatgcccattcataatcattaaatgagttttattatctgaaatgttttaaaaatggctcattagcaagtggggttgtcactgggcctatgtggtagctggctcttggtcatgtctgtctcattcactgtgtttcaaacctacctctccagaacctttgcttggcctctcttctaagggtgtttttcagggagctttctgagtaatatgagtggtgattttgggtacagtaatgcccaagtgtttaacatagttagacaatgactttcacattttgggaaaaggaataaattttcagggagtggtttttggtctggcatgccaagcagtttatagtaggctgagactagctggactagcaaacaatggtcattctttaagaaactatttcttggttacaaattgaatctgaagaatgtgcgaaaaaattccacaaaaacctgcaaagtactggcttctagttgggtctctgttgcctgccaatggaaggcatgagcccttcccaactataggcatttgctctttagggcctgttatttcttatgattgttataaataaatatacttatggaattcctccagttccatttccctaaaccattctggaaagctggtggtttatatggagggtgggggggggggaatcttgtttttgctctgaaacggtagcttttgcttacactggatcctaaacaaaatggccaagaactttaaaacctcaaatcctaatgattgaattcagccagatctgatggtggagttcagtctgatttatggctgcatcactctctgggcagatgtaattactcaagtcaatggcctactgacaaataagcattgaaattgtcaaaattaaattcccagaggggatcccttaaaaataacaaacagaaagtaatgaaaattaaaccaaagcagctctcatttaaaaatcaggaagatgatttgattttacaaatccagaagtgatgttaggtagcagtgggttgggctgcagacaacatgatatctgattaacagtggctaaacaagtaagagaattgtttatctcattcaccagtaaacttgggagcagagagaccgggactgtcccatggtttaacaaggttatggacacatagccttgttccattttccactttgctgtcatcattctcaagattgtcactccatgttttaagttggcagctgcatcaccaggtatcatgttgacatcccaaggggtaaaaaaggaggaaggtacaaaaggccaccagcccataacagccaaacctaacccctttaaaatgctttctgagaaatggcaggacgaacctccctatgtctgtcattggctagagttgatcatatggccatcctagctgcaagggaagctgaaaagtcatgactgaatgtttagtattctggcctctgtagtagaaggcaagggagaaagaagctgggaatagcttttgggtagccaatccatagtgtctatggtggtggtttctgaatttaatgcaatctgtcagacggttatatattagttgggaaactggacttgaatgggactaataaaaatccagcttaaaatgtctcagaaacatcttgagggataagggagatttattttaagactattctctgagcaaattacagtcagttcctattggcttgagagtttgattttagttttgctgcttgcagtttattttgaaacagaatttcttcatgtttcattttactgttccatttttgtatttttctgctttgtagatcttttccaagttggcgggtggtggggaaggagggagtaaagtaggaagataatgaaagggaataatgaaagataaactatattaatgaatattctttctctttgctccaatttcccctgaaatgcaaataaacaaacaacctagaatctaacacattctaggcaaactttgtccataaggagccattaacccttgagataatgagagtgcttctgaatgaaaggcttagtttgccctcatcgtgcaatggtgcaggtgaacttggctggaggttgggagccaattcctgaggtccctagaggcaaaagtgagctgcccaggtaccttggaagctctttccatgggaccttttcatgtaaggcagcatgcctggcagttgcctgcatggcaagctgacatgcagctcccaggcagagcccagagacacaggggtctctggcacaggatgcagtctactgaagcccaggtgtgaggatcactctgacatgcagccacttgaaactcaccagaggtggaaagtgctcacacagaaacgcgtggaggtggtggtggcgctgacagtctggaggggatagaaattgatctgacaaatgccatttaaggattggccaatgtttcccctttggagatttggatggcttcaccatttggcttctttgagatgatgaagaaaaaatgtgattcacaactgtattcagtgactatccagtgtacccttataagtacattggcatgcatgcatgaaagtttggcctttttgtctgaataaaataatgcgttgttatcaaaatgctggaagaatagctggtgacaaccacggggaatttaggtggggctgcggtggctggagaggtgagcccaggagtgccgctggctcctctgctcaggagtgagtattggctgcagccagtaatggggacctgcagcctagggcagagctgctcactccaccagtgtccaccctccccaggtgaacataacagggcgctttggggcctggagtagaatccagtaagttagagtttcatggggaaatggattgggcagtgaggaatgtgaaccagggatagtctgtaggacacgatctgcttccattgctgtcctccatctctcgtggcacctgggacacctgcttgccttgatgttcctctgacctgacaaagcgctgggtggtgtcagagttttgtttgcaaagctctttccattccctagtgtgttttataataagttcagactccaaagagctagggtttgattttattttttgtacagttatccttaaagaacccaatgccaactgtggaaaacacttctattgaaccctatgcatattgagaaatgtcagaaggggacccagggggttcttttcatacccagactgtgtctacccaacagcagcctcctcggggaaaattcaatccaccatctgcaaattttactagtattagttttacatcacagaaccacaaaacaacctggacttccagggttttcttttttctgggtggggtctgggtcataaatatttgccaaatataattccaacatccatttgaaaaaatatttaaaatttggtcagtcatttgagtcgttctagtattttgcccatgtgttgtcaaccctctgatgtttctgaatttctgaatatttctgtgctgtcctgtatcgtatgaatgatagcttcatttttccacctttcctctgaatcctagtctctatgtcgtatatcacattgattcctacctccaagctatactgctattgtagtacatcctaaccttttctggctgattatctgttgactttttggtccaagatgtggttacactgagatctgtgttttcttcatttcagagtctgggaagtatttggcggtttccaatggaaagtaaaacttgaacttcaaacaaagatgaagtagggagacttacgtaagcatgaagggtttgttgcattaaagagcaatctttggtatacttaagaaataacttcagcatttttggggttttattggaccagtgtatttccaaagcccttaacattcctttgggagtttctttgtaacttagtctgtcctcactggctccttggcatttgctgcaggctgggtgggctgctgtgaatgctccactaggaatggcagtcgtaccaggtggtatctgcctcaatttctttctttttttttttttttttttttttgagacagagtcttgctctgttgcccaggctggagtccagtggcgcaatcttggcttactgcaagctccgcctcccgggttcatgccattctcctgcctcagcctcttgagtagctgggactacaggtgcccgccaccaggcccggctaattttttttttgaatttttagtagagacggggtttcaccgtgttagccaggatggtctcgatctcctgacctcgtgatccacctgcctcggcctcccaaagtgctgggattacaggcgtgagccactgcgcccggccgcctcaatttctttgagtgcgtccaaatacactggctgtgggggtagcttcaaaaatgttaatttttactttttttttttttttttttaagatggagtctcactctgtcatccaggctggagtgcagtggcaaaatctcagctcactgcaacctccgcctcccaggttcaagcgattatcctgcctcagcctccagaatagctgggattacaggtgcccaccaccatgcccacctggctaatttttgtatttttagtagagacagggtttcaccatgttggccaggctggtcttgaactcctgatctcagatgatctgcccacctcagcctccccaagtgctgggattataggtgtgagctgctgcacctggccaatttttattttcatagaagatcttgattaataatgttctagcccatcggggtctgactatggatggcaaaaacccaacttgagctcatttaaattccagaattcattggttcttggagctataccatgggataggcagggggccagctggcctttgggatgcctagaactagggctgtaagcatcattggaactctctcctcacctctggtctcttctcaatgtgacagcaagagctggtcaccagcaatgtcaggattcttcctccacagcctcgtgagtagaaagtactggccacatctccagtccagctccagttagaaaaattcctgggaagttccctgggcagtttggggtcacacgtccattaccagaagaattaggggagctttactggatagacagaaatgatgtgtattctttccacaatacagtgtggattggcttccttatagagattgtgtggaggactctaagaatttaggcaagcaggacgctttggattcacttattcttacttcagggaaccctgaagaaacggcaccgatttcagtgaatgatggcagaggccacagttgctgagggaactctcacccctcctgggcgttggaaagactcttccctggctgaggccgaatagtataagaagtaaaggaggaaagctatttggactttaatttctttcggttttgagctataagacaaagacagcactacttttggactttaaatttcccctgggaattttgtgatgggagggatttctgtgaaaatctgggtgtttttatattgcttgtattgtgttatgaacagattgtcatgctgttatgtcatctcattcctgggactgtgctgggctcttctggatagcataaactgggcaaaatttggcattggaataggtcaggacagcagtaaattttcagcctggaggtcagcttgactttggagttggctaaagaatgagttttacccatgtcaaagccttctggggtcctgataggggcggtattcccatctttaatcccaggaagatacatggcaggttactgatgaatccagggcatcgcctgaaggtggcgcgaggtggtcctcatcctcgccctgaggggcagccacagcttgaccataggttgaccgttgcacccagtggggtcagggacaaccagctggggatgttcagggagcttccaaggagaggaactgtggtgccatagagcacaacagaggacatttctggcctgtcccctgtcccgcactccacgctgcagccgagggtgattgggaggagtacagcctggtcggccttctttctttacctggtggcatgaatggattagaagccccaggcatgagtgtctcctctcaggtctgccttcctacgggaaagttccatttggctccactcccacgtccctgtgggaattcatggggtgaggtctaggccggttgctctctgtccacagctgggaagctgcgtgctgagtagtctgccctgcagtctccttctgggtcttccagtggtccagagctggagcagggagacgaggaggtaggaagcacaatggtggccacacgttagagcccacattctccagttcagctttgtcagcaataaacctgatattttgctttctgactcttttatctgtttgttcaattttgttttgaactcaaatgttcatcatgagcacttttgtgccccatgcttcaagttcaggaacgggtgcttcatacatttagcctggggaaatgaaactgaaacgtaatttgttattgatcagcacactagaaatatataggcccttttattgcttggcctaatgtattccatttggtatttgtatcagttcgttctcacgctgctgtaaagaactacctgagactgggtaatttatgaagaaaagagatttaattgactcacggttcttcaggctgtacaggaagcaaggctaggaggcctcaggaaacttacaagcttggcggaaagcaaaggggaagcaagaacgtctacgatggtggagcaagagagcgaaaggggaggtgccacatattttcaaataaccatatcttgtgaggctatcatgggacagcactagggggatagtgctaaaccattagaaaccactccatgatctcatcaccccctacctccaacactcaagatcacaattcaacatgagatttgggtggggacacagagccaaaccatatcactataagagatgggtcctaggaatcaatgaattgtctaagtacagtgggaccagcagttttgagatccaaagataactcaaatctattattttaagacttgattttcaaatcaaatcaaatggatttttagttacttgagtaattttctccagggaatacttggtagaaaaatcaaagaagaaatagcatttgtttttcatgcaactgttccataactcattaactcagaaaatatttggttttacctattcaacattttgttagtggattttttgaaacctcagctgtgtattttaacttcattatctacaacgattatgtgagtggtaagctctgtttcagtgcaatcacagaattaaaaaatgtaagcatgcttatcagttgctattttgtttctaaatggtagactgactgtaaatcacacttaaagtattcatttattcacctgatatttattgaatgctgactctgagccaacacttttggtgctgtagaacatttggctaaaatcagtgcatttcaaagttaaaatggagcatattcaagggaattatgcctgatagaagatgattttattctttgtttctccctggattagtcgtgctttttttttgtgacagggtctcactctgtcgcccaggctagggtgtggtggtataatgataaaccatagctcactgcatcctgccctcccaggctcaagcaatgctcccacctcagcttcccatgtagctgggactacaggtgcacgacaccatgtctagctaatttttttgtattgtttttatatatagaaatgaggtttcaccatcttgctcagactggtctcaaactcctgggctcaggtgatccacctgcttcagcctcccaaagtgctgggataacctacgtgagccaccacgctcagccatgtcatgctcttataaccacccctgcccccacctctaaaatctaccatccattcatctttttccttttacctaccttgagaacttaatgaagtaactatatgtcattaaaaaattgaaacaaaaccaagaccaaaagcaacacttttaatccagaaagattcagttactgtttcaaatcacagttttctcagcatgatttcttatgaattgtgtcattatggcattatttttaccattggttcactttattcactgattctgaaccttccttctctttattctgagaaatagtgcttgacagagttcccttgagaggaagcatgcctattttcgtccaccatggatatgcctggacactgaaggatgatgctgaacatctaattcaggtgcttggacaggtggtgttgtctgaaccaagattttgaataattggatattgaatttcattctgaaagtgttcagtttgaaactcatattggaccatatagacagtaagggaatattggtctggaatggttaggccagaaatagacatgcagaagtcaacagttttgctggtagttgaagcctgtgtagcatcccacactcctctccctgaaggcttcctgggatgcatctccctacttcttggagcccaggacagctttttcagagccttccggtctctagagggagggaggggaggtctgggggtgtgatgtgattccttggacagatctgtacctgatgccttcaggggctaggttggtctagttcctctccagactttagctttcatcttgattcatagactttcctcacggacccagattcacagagtctctgaattgaaattggacacgaggaagttgtctgggtcaacaactaaaggatttcttctggggtcaaggtagaggtcactgactggccaccagtggactgagtccaacagctcatgtgtgtatgtgtgtgtgtgtccctacatagtgtttttttttaatggagttaatcaccaattaatacacaattgggagttttcacacaaaaatcagggttttagcttcttagaaaaaaatcccagaatgtctgacaatgtggagcctggacaccttttgtctgaatttcttttcgtcaccggaacctaaactgaattgtgcctttagatggagcatatattctccatagatgtcacttgctggaggttcatggcccttgtgagcatttcatggtcttcattacttgtaggcatggtccttggagactcctggatttgatcttgttggtcttacctcctttccttcaaccataaaccatttaagtgagcaccaagtgtgtgggcagccctgagtgagaagatgaggtatggtgccccatctactatgatgaacagaccctgcagatattggtcaggttggcccagagacctaccgctggactcaggcttagttctgggctcagcatgtcagcaaccccggggaatctctggaggcctgtctgtgcaaactgaagactcttcaaggacagacattgaagagccattggaatcttggaatccatctatctaagagcagtcatggatccatactttgacccttgaaccaaactggcctctttgggccctcttggataagttctggagttggtgctagaccaaagtaagaaatctaggtggggattgtgcccttatttttcattctccggcaaaccaatagaggtcatattccccatgggagctatggcacagaagtgtctagcctggcaattgctgggtatctgaacggccaccaaaatattattttgccactcagtccccagcaaaatattcttgaatctgagtaaagtttactggtatgaactgtggaagtgattttgctgtgttatgaaatctttggagtcatagcaggctcttactggctttcttcttctgtctggagcaccttaccatctgtctccactcaaagacagtcttgaatgaggaaggacacagacaggaaattcttttcatttaacccaattcccttaggctacaacttaagcttatttcctcattttgcatcctgtgaatatgaaaaagcgtcttgtcatggccctacctgtcatgcatggactgtgaagtttcctcccaatgttccttctattggactctttgattcctgttgaattgatgtttgggtttgtcatttttctttagagacccagtgcatggatagatagctttaaagaatgtatcctatatcatcttcattagatgagaatactgtaaatgattacaaagattctatgattcatttgtccagcagagaggatggtctgttcaagtttctaagaatacttaaaaataaacaagggactcactttgtcatatttcatctttatgctatcagagtgctgattccataacacagaactcagaatgcaaccaacagagcccgaagccacattcacattccttatagctttatttcacgttgaaggattgcactcatgagaccttcaaaacaatgatcgggaatagaacaaactgtcatacttctaaccccaaggataagttttcagtcaagtaatgtaagctcatgcacattgatttctgcttgccagaatgactgccccttagttagatgctggtttgatgacttcactcagagctgaggcactgcgggtgagaggcagggctggaatgatgggcaggattgctttttatctgggtctcctgtttgtctttttgtccagttctctctgagttaggcatggacgagttaggcatgaagcatcaaaaatgacatcaattttaatatcaaagtcaatgggaatccaggaaatgaaaatatctcatcaggtcaagcgttttgtttaacaggtccagtctgtgtgtggtgcggtgggtgggaggaggaggtcgcgatatttggcttaaggcattttgagaaccttaaattcagagttgatcttataaggagattgacggtaaggttgcctgtagggttttgtttcagagtccccaaaaggcctttatgttaaaaagaaccttcattaggtaactctctaaggcttaaattgtcaccattagaaagtcactcctctggtttaaagttttgtcataagaatgcaaattcctgagagagaacatcactcacttattccattccttccagaagagagaggtcgatgaggatgcgcagcccaaggtgaagtgattgtggtgggtagggaggaagagtgctcccaagagaggaagatggtgggggaaggtggggtggagggtggtggggtggtaaacagctctggaggtcttacaatttgttttaggatagtatgtttcagtggatatggtcatcgatcattgataataagagaccaattccgagggagcatgagcttctggcagagctgggctttggagttgggcaaagccatgtttgtagttggctccatccctggtgtagctgtgtgactcagcacagaaattattctgtgctgtgtccaacgacaaatgcaaggtatcgcagagaagaacaatgaaaatatttataaattgctcttttcatgtgtcagtaataaaagtaaatcatgttctggcctaggtagctgtgtactgattgaatcactagtgcctggtagaaaatgtgacagtatttaggttttacagttctcacattttagaatgtctattcaagatctcacttttcttgagggagatttgctgtaaagaaaagtgcgatatgtatattcattcatttatattcttccttgggagaaacactcaaccatgagcttccatttgtagttttcggatatcttgttttgcttctacacaccttttagtcagtgtgaaatgttggattcctgggaatgattcctgctgaagttgcttgtagataaggaaaggtaaatgaaaattaaagaacagtaaccactattgctaattttaaatgcctagaaaatgattggtgtcttcatagtcttcccaactcaaaatttcccaaagagcatgagcctacttacctgtgattcctccctcacaggtttacaggaacctcacctctggagttgggagggaatgctttgtagatttttgtccataccctaacatcatgcttctgtctccagaatagacattctttctctaacgcttcaaaatcctcaaattcatactcttctttcatcccttgaatttctctaaggagttctttcccttgctaatcattttactccagaggcaatgggcaattttgggaggagtgatgtgtgttagaattatctatgtttattctgttcagaattttcatccaatattaaaatcacatactaactcacatatgtgtcatcactaaacatgctccttttcttttcttcttccctgagactccaaatgcgtttttcttaaagttactgtttaaaggttgttggttttgtttttaggttacttttttctttcttgcagcatgctttactcaatagtcagtttcagttccaggtttgccctagatttgtttgactgttgcttgaatatttcacacacatttatattatgttgcattacaatatcagttacatagtgagtagagagattttgtttgacaaaatgttatgtttcactttagtaattttgaaaatgaagtgaatttctttggaacctcataagtcaagataaaaaagtgattgtacttggtactaacttgtttttcttctggaacacaatatggaaacatttaaattagacatatgcagatagaaccagagttttactcgccctttaagctgttgatgatcttggtttgttttctttgtggaaatgaatgctgctgttatctcacttagaatacaatggatatttttcttaatcaggacagttttatgctgttctctccgagacgtttaaagattgtccaactgtaccacacaacatactaataacttatttactatataaatgctactggagagtatggcaaattactgatttgttattctgtcactagcaagacagtgtaatcaagccagacaatgcctaaagtttatattgatttatttcccttttggtttaaatttaccacctacggttatccaaaatacacgaaggcctgtgggtttggtatatttgttttgttgtcacactgtaatgctgtgcaaatacatgactatccttaaagtctttcggatcatactgattaaacgtcatttactgttttcctaacaatatcaaagacgattaaaaaaattcgttttcccaatctgttattgccatgagttgatagttgcgctgtttacatagttgaccacccactgaagccaaggcatgtgaaactgctgtccactaaaatgggcctgaaagtcacgtgggacccacccaaagatgctaccagtagacctgtggagcattacaacattgcctatgggaagtcactgaaaagtcttaaatacatcaaggtgaatgcggagacatactccttccttattgaggatgtgggtaagtgacactctgatcttgttcccagtcagaattaactgtgcaccaacattctcagttgcattcttaggatgactgtgagacaacccatggctgggctcaaggtcccttacggttctttgggaatggagagctgagttctgagatgcttgtcggaggctgctgtttgacagccggtgtgggacacttgggcttccccatccgtgcatgtgaactcaagtattcctgtttccaaactgatgcagcagatgatttttagtttctgaatgtgttttcagaaagtagattgatccttttttgcttcatagaaacttcactgctagacaactgagtgggctgatctagagacttcgaacttatatgccattttataatcagggattgggcaagtcgtatgcccctggagatgtggaatacgttatgcctagccacgtctggttaaagatgtaacactttgccccatttaaatttgactttaacttgattctggaggtttggaatatttgagattttgcctcaatatattttgtcttattaagtgcagatgtagttggttttgggcttaggcttcgagctgcctctgaatcctctgtcttctatttttgattccagtaacctaaagccccattgattcttgaaccatgtcatggcccaacattaagatggatcataaggaaggaagagaagtcagcatttaggaaacaggtctcctcttgtgccaccttagcactttgatcctttagtggatcatgggctcctcagctttggtcccctgaccacagctgaccacacttactccttctccacctcctgcatttgacatcacgcttcctgggtaacagagcagaaagtttataaaagggagatgaaggaagacagactcccttcctcatggcttcagctaaatgtccatttcccttaatctcttccacgtcaccttggctccccaagtccagctgtgaagttaaatggagattctatcagatcaaaggcgtgagcagatcatatctccttgctcaaaccttgggttgttatgatggctgcagagaagaaaaacatgtgaaaagagagtcgtagagctcactaaaaaacaaatagtatctcccagacaactttctgatgagttaactgtatgggtatcaaacacatgtggattaaatttctttgaaatacaaacaagctcagagtaaagagagaaagtgtctggcgaagcatgattttgcattctgtctgacccccgggcatttccccattagcctggcaggtcgtgccaaaccctgaatgccaccaggccctgccacagtgagacagaagtcacaccagtcttgatcacagcaggcatcccagggggcatcagccaggcttctgttcatgggcctctggcttgaggactgagtgaagttttgttataataatgctccctactttgagaaatgtcattgtcattatgacctttgacagaactaaccctcacctctccagctctcgtcccctgaaatacccacagactttcgtctcttcaagaaattggtaccccacttacctgtcacaagacagtgattcattttcaggaaacctagtacttagtagggttttaccttgcagagctacacgttcagggtgccctcccctgtaacatgggtcttcatttcctttcccatcccatcaactttaggagctcagcccaagagacctctgctatttggccttgacccctagatgaaagtcaaaaagtgaagcccagttatgtcaagattagcatttccaagactccaggatatatatatttttctagctttttgttggaatggtcaaaaacaacatgcagacatagtaaggggaatattttattatgaaaaggagaaaatttcatgaagctttatgtattgcagtgaagatttcccatgtgctacattttatgggttacattgacatttcttattattttctggagattttcatttggagcctctaatggggaaggattattagtagtgactgacagtgtatgttcaaacacctatttagtggacaaggagttcctgtttcctacatggatttcacattaaaaccttcaaaagctctttttgttgagtgttgatgaatccaggtttattacacatggcatgtaccttgtatgaaataaagtttatgttctttgggtcatgtgtttttcagttgcatgagaagaatgttagtgattttaatttaaaaaaagagagacatctatcattatgcttgtcactgaatttggatttttgtatttggttataactggtataaggaagatggttatgcatggttagtgagtgaaactgtgtcattcttggagatctgaattggtggcttgatatgaaccgtatgtttcagagccgggggtagtgtactttgtgctgcttactgcagaaaaccacagtggagtgagccgtcctgtttacagagctgaaagcccacctggtaagtcctatctagaatcagaggctgtagtgttgttacttagattgggagagacatccctccttgcttcttccagtaaatataaatttagagttattaaataatttttgaacaagaactttttagacttgtatagcaagctgacagattgaaaagtggaagaggcttatcctttcttttaaaatagttttaatgtaggttattagcatttcatccagatgttttgaatacttactgagtaaaccatgtgtaaaagacctaaaatatgtattgtccgtaaagctgaggtgtccagtcactaatatgggctgagcagatccttttgaagatggttgaaaagatcatttaattatacattatggatgcactgtaatgtggaaaacccaacagtcctcgtttctaactatcaagttgcatttccctaatttaggaggtgaatggatcgagattgatggttttcccattaagggtccaggaccatttaatgaaaccgtcacaggtactacttcctccttcatgtcagattcatgttttcactgaagcatcgtctcgcaagagagttgtgcttccgtcacacacatgtgctcacaaaccttcactgagttcccatcgctaaactaacacacacgccacacagtcttggtcaatctgttctgcatccaatgaactagactgtaaccagtgttgcttattgttcaccgttctttcatgttctcgcgtggggaagtgtctgcgtctacatctggggatattgttgccctcttcataggcaaatatggtggttgagatggcagtactgaccagattaggatatttatagctcttctaccagtgaatcaatgaatggggtccccccaaaatagtggcttttatgggctaacatgttgcttcaagtcttgcttttttcttacaaccttgggatattttgtgatatgttagacgacctaccttccatctctgctccatatttgtgtatctgtttgttttctcatttggatgttgatgttgtctggtcatattgttttacttactgagaaaagtgttgacatttcttgtgtgtttcttgaatatatttaattgatggtgaaaaaataatgtaaaatgaatgcagttatttcagagtgtggttgggtaatatctcaaaagcactatggtgaggagctgtgttttattttcacatgccatgtgtttaaatatatcaatctggagttcttgttgacaggaaggtgagtatgatgaaaccaatgatgattatctgcttttcagaccagatttgatagtgtaggtggtcttcacagtgcatgctatatgaaaagggggtggaagaacaaaacatcagaaaagaaaactggcttttggggagagactaagtgttcttgtttgaatgactatgaggtgttgcaacagaaatgtcttgtagctgatttgagaagagagaatggaagttggaagagggaagtaagaacgagacatggacttaggagtcatgctataaggcaaaagttgaagtagagagctcatgagtggctgaggattagcagaaagaagatcaggaggccaggaatcaaaccatggaaattcagtaaaatggtcaacaagttagtacagctagcaagtgtgcaaaagaagaaaaggtgtttattttcagaggttgtttacctctgaacacacacatgtaaacagacacgtgtgaaccttttactgatggatgtgtgtgccttgcatttgaatcttatattttgtgttttaaataagcgtcttatttttacatccttcctgatacagttttttgaatgacaatagctttagaacaagtgattttcttgctttttcagaagtaattaatttcttatgccctctttaatagtgtgtgtgcacacatgtgtatgacctttctgagtaagtgagcagaaaccctggggaccagggatcagacagccgtgttccagctcattattggttgtatgtattgtgagattattgaacttctatctgcaggaggctttgcaggccctggttgccaaaccactctgctataatacatgatgtttcatttgtcatacatggtgattaaaaaagataccagaagaaactgctggctcaaaccacttgaagcatgtaatataaagcagaacttaaaacaacaacaacgacaacaacaaaaaaaacccaggaatatccagaatgcacagactaggttaaagtacttcacaaattacatttcattgttaataaaaataataatttatgtgaagttatcagtaagtgatcaccatgtatctataccttttgatgaggcttggaaaatatgatctgctattattccgagaaattgttaaatatatgacaatcttgccaaacaaaagaagtattcagaattccctgtcttcattcaaagaggaatttgccttcaaaaatgcagacattagcatgggcacctggtgtaaggcccaaagggattcactttagtgctttgactgatagggtctcacatccttcctgtgttttattagaaaccagaggaatatccattcttttaagctgctagaaacaatggctgcagttctgattccagaagacctccttttgcaggcttacagctatctcaactgaattgtctttacctaaaaataggactttagttattcaattaatttattacaggcggaggtctaggtgttagagatacaagctagacaagggatcacctcaatgaaacttatattccaatgagaaagaaagataacaaacaaatatgcacaaaatgttgcatataatctattaatttgctggggctgccataacaaaatgccacagactggtggcttagaaaacacaaatttatttctcttgattattgggtctagaagtccaaagtcccgatgttggcaggtttgatttctcctgaggcctctatccttggcttgtagatggtcacctttttgctgtgtccttgaatggcctttctttgtgaacatgcatccttggtatctgtgtgtccacatttcctttttataaggtcactagtcaaattggatgaggccccagcctaatggcctcattttaactcacctctttgaagactctatttctgaatatgctcacatgtgagatactggggttaggacttcaacatatgaatttggcagagggggcacaatgcagcccataacacatcatgaattattttaaaaataagcagtactgtaatatagaataagcagatgggagtgacggtttgggagcctaggagacactgataagatggtggcaccaagttgagatcgtaagagactgtgagggtgaagccatgtggggaggaggaggaggaccatgccagagagtcctggagtttgggcaagacttaagcaattcccagactggtcagtcgtccaaatatgaaacctctcagcactcaggaaatgacaggatcgagcgagaatgcagcacgagggcagcagttttggctcctcttgtgttgctcatctcacttctccgagccggaaagctttctttgtacttaatgcagaatccctcttgctgggatggaaacctgtatcctcttgttctgtccccagggaagagatgtcacaagtctgttcatttattggaatactgttatggagcttttctgcagacttcttttctgcaagttgttttggctttttttgtgtaacaggatctgggtaacctggcagtgcagagccaggccctgggggtcaggacagggacacagacacatccccactctgctacccgccagcctagggcctcagcccagctagttagtcagcttttgtcaaactcttcatttgggaaacagtattaggttctggttaagtatagttctgaatatgatcatatctatttaatcatttttaaggtttttctaaaaatcaagtcctctgtgcttttctcaagttttggagcctaaactaggcctagtactgaaatcaaagtctaatttctgcctcatttttctttacattatattttagttcgcgacgcttgctcatttttttggacaaacgatagcttggactcaagttcagcatagagtccacaattactccttggccatttccagacgatgctgcgtgacaatcgcttgcggaccagacatttccttatcttggtcacccactgacttccgggttgctccctaaatccagcaacttcaggcacttgccgcatagtgggtctgtattccaggcatccatgacaatgacccatttgatattctcacctcctggctctaactgccacctcccctcatggagttaaagttacagatagagttgatcccttccaaaatctagactcctggaatccccatctgatcaccatcatctcacttcctcaacaccctcacgtcagaagcttaatttcagaccatagtagactttggacctgtagacccttcccagctgtggggtccagaagctgccgctgtcctgtttcttctttactttatccaggtcccatcattccaaccacactccacatgcaggtctgcccccgtcatttcagcggcctcactgctgcagtgctacctctgcccgtcgctctgccaggacccccagctatctagctttctctgtctgccatgctgatggctgggctttgtgagacagatgaagagctgatctgatttgagttacaacagcttgtcagagctggttttctcacttcatccaggtcctcagtgctgcttggccacttcctgattgtcctcacacagtttcctttctttatgccacagtggctagtccaaaatgtcaccactgtgctccagcccatttcctggcctgggttcctttcacttctagtaggtgacttgcttcctgcttccctggggggatgaaggtttcagctgacattgcccctctcccttcttctccctcctgaaccctcactgctccctgccctcctgctggctctagggaagggctgttgtcaccttctctttaaggctgacttcatctacatcagtttcttggaaagcatggtagacctgagggcagatctggggtgggattcatctttggatccctcccagtgcctggttcagaaagttgatacctactgttgaactaattatttgataccaaaacaatgaaactatgaaaacatgaaaaaacaaagtttggcattgtaaagatttcttatctagcactcttttcatgggcatagctacagattgatgggacatgtataccccagacttgtattttggccttttctgtcagtatttcatcaaaatgagcaccaactttaaggcatatgatcttgctggtttatttaaatatgactgatgtggaagttgaaaactctaaacctagtgtcttgagatggctgtctctccaatctgctgattcaagagcataattaatccaccaaaccataatctcgacactgttcacctctgaacacctggctccggctccaggttcaggccctgactagctctcagccatcagcaactcctgtcttccaaataccagatttctcagctatgaaatgatgggattcaacaagaggcttctaggttcctttctaagaactttcttaggctccaaatttctttctaaggttccaagtttccttttagttttgaaatgtcatgaaactatgaggctgagtggacggattccacttttaatgaatgatgctaagctttgtgagcagtagaaaaccatttgtcatactgaacaaatggctgttttcctattttttttaccctactttgaatgttttaggtcattgcattcaaaagtcatattagtgaaggaagaaatgctaaattgtaatttctgcattttgagaatgtacttaaaacacaccaaaggtacacagaagaaagactcatccccagtgataatgctggaaagcacctctcccagggcccccttgttgggtgtcctcccctctgtttgcaatggtggaattctgctgaatgaaccagtggagatggtgatgtcaacttatttaaactgacatgtgtcattggcacttggtgcaaaaggtgccggcagagtaaaccaataggcaaagcaagggctccaccagatatttctgcagccaggcagtggagctgctgtgcaccagactcgtgcttaacatgtaccccaattcaaaagcaaggaattaattatgaatcaaagactgccttctttccaagtacaatttcaatcaaagcctttggccaatggggaattaatgctgtctgtgacattactttcacagtagctttctcatgcagttattagttttatttagtgtgcacttcacaggacaaaagttcatggcctggaaggtgagctccttaagggcagggtgctttgatttactcatcttcctatctccagagcctggggcaattgcacagtgggtgctcaggagacatttgttcagtggaaatgcatttggcggttgcttctgccccatacctgtgcttggtagaggagtgggcattgacaagagtgttgacaacagctggggcttggacgttgcagaggtgcctgtgagaagattggggtcacctctgtctagttcaatgttgattcggggggttctgggcaagcccgtttgttgaactcagattggtgctaccattaatcagagattctacttcttgtcttttgctactgtgagggcctgggccaaaaaaaaagatgtgtgcatctgtaaactggaattctttgggctggctggtctatgaagatgaggtgtttgcacagccagatccatgggctgtggggtggcctgcccactactccctcccaaggaagtactgccccagaacgagcccttccatcttaagggcttggatctcttcatccggtgctcgtttcaaagctgcctctcatgttaaaatacagctagactttgctagttgtagagcccattctttaggtaataaaaatgtgggagacagaggtttgtgtgagaagctgtttgactccatttagccagatgtccctggggagaagcaaaggcctcaggagtccctgctggcacccccccaccccagcagaaatgccatggaagggaggcaggaaggagctagctggccagaaaagagattgattgggcacagccttctcctacctttgaggtgaaatcacaggcatttcacgtgaagacacaagcagtgggggtaaggccctttcttaggacaccaggatgtgtgcttatttcagaggctgatgagcgactgttccgactgtgaggggcgggggctctgggaaggtgggagatgggtggtccctgcctgtgccaccttgcatgaagcacttgccttcaagtcctggacttgccttccagtcctggaagaacctacagtagtttaataaaacctaatacttctgatgaggccagcatcttggggttcacttgctgctttctgattgatatctgggcttttctctggatgtctgtgagaaaaagagggcaggtgtgggtctgtgatacctctgagaggggaagcagcttttgtgggacccttgcaaattcagatattaatcctgaaaggaagcactttcctttttaaacttatcaacctactcatatattgtaattggatctttcatttgcaagtgaagccaatgtgtgtgtgtgttggagaacagttaaaaattgaagtaaccaatagacgttcaacaaaacaaggtctttgattgccagaaaacaactgcattacttaccattctattcccaaaggaaacaaatacagaagaactttaaactaaaacaaacaaccccgacaaatcaaaactctttgaactgacgtctggtgttaaattttccttagaatatttaacactccttctcttcgcttagaggctatgaggccatctctgtgttatactgtggggatccagccattaagattggaaaaagattattgctttctttgctttctgtggccctcatgaatcctgtaggggaatggctgagaactaaagcaccacgagatggatctagagtagatgcttctaatgactctatacactcacgccaataacggaggaaactttcatatccagtcccccaaagaagctgcctgatccttccacactgtgttggtggggattgggctggggatggggagtgagtgagctgggctcagggtaggactgaccccaagctgctgttgcagatggcacagcgatgtctacatcagaatcataagatggctgaagagggcaactggtattggtcttctgggtctagagataagctacggccacagatgggtcacagagactctagccttgcctacacagtggcaggataagggaaagattcccctcaaaaggcttatgatctatacaaattgagagccatatccatgcaagcaactgtagaacctcttaattcttgtggtcgtgggaagggcttcatggccatcctgtgtagagctcttcattgtcactaatgcagtggatgaccaccgtcttggcattcggcagcccagcacagcctcagacctgtactgtgaaactgacggcacaaagtagtttttcttgatattcatagcactccactaggatcaataccaaagtcagctactgactgacattttgggtgacatcctgaagccactgccatacctgtgattctcagggcttctcaaactgggatccccagaacttgggagaatgtgacacaactaagattccatgaaggcctaaggtcaatagaccatgtccaacagggagaattttcctgatggccaggcattcaaatgttatttttaattttttttttttttttttttgagacagagtctcgctcttctcgcccaggctggagtgcagtggtgcaatcttggctcaccgcaacctctgcctcccggcatcaagcgattctcttgcctcagcctcctgagtagctgggattacaggtgcatgccaccacgcccagctaattttgtatttttattagagacagggtttctccatgttggtcaggctggtcccgaactcccgacctcaggagatctgcctgcctcggcctcccaatgtgctgagattacagccgtgagccaccatgcccaggctacttttaatttttaaacaaacaccaaaatattatggagtagtctacaaaatgtaaatgcaattttgagataaaaatgaagattaggaatgaatttccacgctccaggcttctgggctggggggattcattctctctgctgttagatagactttggtgagaagttggaagaaaccttagttaagtgacagagtgattcagcatttctgtgaaacaaacaacacaaactctttgaaatggagtggccccaggatagcttaaagagtttactttgcacctgagagagtcctgatggatttagggtaccccgcttgggggcacagatgctggcagccttgcaccagcatctgacagcaaaatccctttcttgactccatgtcaagtggcatttcctggggcttcctgatttgatgacacccaggatgtcaggcaggatcctggaaggcaggaagccagagtctctgaaatattggatgcttgctgtgggcagcagaaatctcgaactgaaggtggtgatgttgtctggtttgtcttgaaagttagtgtaaatgctttataaaggttctttgggcttccacgattcatgacattaataattggcattgattagctcaggggagatcaaggtcctttccctttctttttctttctctttttcatcctttttttcctgcttttaagacctcttcttccaatccctgaaaatgcagcaagagtttactgactgcaggggttggctgaggggtgctcctctggcatctctggaggaagcagtgtgttgctgtccttagtgtgctggccacatgcttgactcctcatcaggggtctttcccagagcactagacacttacacatttaagaggaatagtgcactgagcagatcttgatgggacagatggtgctgacgccctctgaagagcagtcgggtccttgggaactgtgccagcttctctgtaagcggggcacatgcacatcttgccagggcgtcctggtgctgcccaccacatccttcgccagtgtgatttgggaggcaccaagaggaccttcccctggagaaggtgtgatgcttgtgccacacatggctactggtgacaccaactctgcaaccaccatgagcttctcaacaagagctgctacggagagagctagggctaccgatccgacagatggggtgcgaattctggcttcggcttcctgctgtctggttttgagatgttcccttagcctttctgagcctcacttctttggtcagcagatgggctgtgattgggtgccttcaaggatggctgccaagtgccctttctccttactgttaactagctgggcctaaccaagtatcacagaaaaccagtacatagttacaagtactgaggctgcttatgggagagaaaatatggcattaaagagggactttacgtaagtattgcaaatattgggtatgtagaagaagagtactgtaaatcaattcaaaggtgtttcaggagggttatgtgtcagaacttgcacaggaagaacgagcctgtggtggatgcaggctcgggtggcgtttgctggagctcaccaactttggagatgtcaggcagcaccgggcctgggcatgagctggggtcagggagttcagatgcagagtatggccaacaaagctgatgtcctgcccccatctggctatcagcagccgaccttcactgctcccggacacacattctcacccctttccctgccctctctttcttcttcctctcaggcttctcacctcttccttatcaagcttcttcatcaggagtgcacaaaaggcctggtcctgatggaggtgggaggccaggtgaaaacacaccctggccaggtgcttctggttcacactgaacttcgagcaccatggctccggcctaaatggctggacaccccctgacccccacccccggcgtgcagattggtgtccacagttataatggaggctggtgctggggatggtggggcagctgcctggggtaaggtgggtatttgaaggcctgtgagcatcaggcctgctctttcaggtcacggggatagagatcaggaccatctttgtgaagttggtggtcagcgcagtggggtgtcagatcggtcagtgggacaaaccagacaaattgcggctcttcaaggctgtagatggagtgaaacctcacattctgctgggaagtgagcatgtcctgccaggcaagacctgggccaacagaaagtagccgccagacagctgtggtcatgcgttcttttacaccaatgaagagagggatttcgagtgactgataattgctagatgttgatgaagatgaataacgctcttcatctggctataggcaacctcatatttgaaaagattttcaatgtaaagggtccttggcaataagccctctcttttgctcacatttggttctttgaaacatttttttttttagtgcccctgtatgcaaggcctggtggtaagctctgtgatacattcacggctcccattctgaagggggttacccactcaggtagtgaatctagtaagtgagggatttcatttttgtcaggcccacaaacacaactagtgtgcttaatacagcatatgtcaggtatggcaccgaacgctttacatggttatattacaaagtgcatatgctgtgcactattttacagaagaaactgaaattcagagaggtctaagccacatagcctgtaatagattcgattcagactttgacttcagagcctgtgacttcaagcccaattcagaagctaccaagtttaactagcatagaatgggtaaaacatcatattgaattttagattattttctttgtaaaaagaagagattttgattctatacaacttcagaatatttgccaatttgcaaagccagtggcacaaatccggagaaatacttgaatcctgtctggtttctgaggtctactgcaatctggatggtaattgtttcacccaggggacctgccaagtgggtgacatatcattagttgccgcaggtcttctgttatcagccagttctgagtgcaattcacctgattacgttgtaccaacagcagttgagggaatgtgtccagccaagtttgaagtacattcagcgctggtggatgcaagctccattacccttggcagttgtgacttcctgttttcaagataaaagacttacacagatttattagagaatttcagaaggctttggtgaggctatcacatacagcccagagagaacacttaaatagtttaattgcaaatgaatttgaaccatatggctagttttcttaatatgcacatcagtttaaaagaggattaccagatgatctatcaaagatgtttgatggtatatataaccagagtattaaagaaaggaaattttcaaaatacttgaaaaaaatggggttggtttttctaaacccaaagatttgaaagagagacaattgtgtttagagggaggacattctcacttcactctggttattaccgagacagcgagctccatgttgtctagggaacagttcttcctgggtggtatttggtgacagtccttctcttgtccgtttgctacctgctgagaatactttttgttatatgtaatgcctactgggcaaagcagtcatgtgtttataccctgaagggagcctgttggctcaaatcccttgtttcacattcattagaagaggttgggaggttggtgggatggcccatggggtaaggaggagcttaaatgaaaggggcatcatggaaaggggatgaaactgggaatcagaatggctgaactctgcctggccctaaacagctatgtgactgtctgtcagctactacttcccctctgtgagccacagttttctcatgggggtgatgaatctatcctacttaccttggagctgttctaaggacagctagatgaactatgtgagagcttgctgcagagcgaaacattccataaaatagggggattgcaagagccagcctcagccctgtccccaaagctgttcagtgggcctggtctcattctaggttggacagcaaggccagagcctggaagggggaagcgtgtgcaatgagcagaaagctgttgtccctgctgttggggtgtgtggctcatgtttagtgaacctggcatggtgcaggacagagccaccggcagacactgcaggcaacaagcttgtgccatctgtgaccaggctccttgtccttggaacttcactcctgactcctcagggaccccgaccctcaggaaatttcaaagaccttttaaaaaatttttattgcagcttattacggttgagtgtcagggattgccgagtcagaattggtttgtcctggaacagagaactgccatcctccccagggcccagcagggacactgtgacccccagtatcagtttccatccccagacacacggctgggaaggtctcaggactggagcagagttcagggcagaggatgctgtctctgctcaatgatttatgttccagctgactcacataagaccagtgtgtgtgttctcagtagatctgctcattttactggactatacttttggactaaaaacaaaaaaaaaaaaacctttaaaacaattactactttgattattggggaaagtatttgttgaacataccatggtgttctcttagtagcctataggaatggggtgcccagtgactggttgggtagctccagctaatctacaagtggatattccttttggttagattcaggacgttggaaccaggtgtctgccatttcagcatctccaaaggctattgatttatgtgttcttgaagggcatgctgaattgtgatattagattttgtttttatgtcttagtgttgaaatgttagcctagctgggaattttccaatctaataaaattagtcagaattggtgatggggttaatgtatatatggaggaagaatgcttgggaactaactgccttacacaattaaagaggtgctccttagcctaactggatccccaaatgagggcttacaatgtggttagtggcatattctaaaagagggcaaggtggtagtcacatgatccataacccttgtttccaaacataccagctcttatttgatatacaagcaaaattttaaacactaagtattgatcaccagaatacactgctttgggaaagtttatagtgagggcatttcttgagattaactggcttagcaagagatttctcaaaactgattaatgtagcaagtaaaaaaaacaacagacacagaggatagcagcgatggtgtagcatggccaggctttgtctggaggagcaaggcttagacatggaagaaaaattaggacccaaaatagaaatcagttaatgattcattgtaaaggcaaggaaagcccgtcttttcaacattacagtgaaaaagctttctggaggagagttataaatagcacataatgtctctctgctatatttttatactgacctttagctctttcctgagaatatatagttttggcctaaaggggacaaaaggaaatagataaaaagggacactgtaaaacatccaagatttctggcgggcagtctcacaacatggaatgttttattttaatttcttgagaccttttggtatgaaatgtggggaggaatatgtggttagagtattgatacccttgggggaaaaatgtccttactagaattagttaccaagaaatgcatgtttgaagctcagcagctaattgttgaggctcagggtctgaagacctcatgtgcatgatggcaaactctaagtggtctactgtctaaccacttttgtgtcctgccctctttaagaaaaggaagtgcccaacaagcccttgcgtgtgcgtgtccggtcctcagatgacaggctgtccgttgcgtggaaggcaccacgcctgtctggagccaagagtccacgcagatcacggggttttctcctgggctacggggagagtggccggaagatgaattatgttccactgacaagagatgaacggacacacgaaattaaaaagctaggtgagtttcatattcattggtattcaatgtttccatggtctttgggatcatttcaatatttagaagctcattcatgacagagcattatattttagttgtaatgtccacttgccagatgttacaatgatttgaatctctactgtttcttccatgtccatcctggacgccatcattttaaccttctgttagtggcagccccaggctgccttcctagtgcctgtcagttgcttcctgatccgacagcacagactccttgagtcaggccattttcctggacttgagagtagggccagtcttgtcatcttggctgtttttgtcattttgttctttgaagctttgtcttagaatcctaggacactgggccttgggtcccattaagatgagacatggtagccgagtgaaactgcaagtcaggctttattagggttctctagagggacagaactaatggaatacacacacatatataaaggggagtttattaagtattaactcacacaatcacaaggtcccacaataggccatctgcaggctgaggagtaaggagagtcagtccaggttcccaaactgaagaacttggggtccgatgtttgagggcaggaagcatccagcacaggagaaggatgtaggctgggacgctaggccagtctctcttttcacatttttctgcctgtttatattctagctgtgctggcagttgattagattgtgcccacccagattgagggtgcgtctgcctttcccagcccactgacttaaatgttaatctcctttggcaacaccctcacagacatacccagggtcaatacattgtatctttttttttttgagacgaagtcttgctctgtctcccaggctggagtgcagtggcgcaatcttggcccacggcaacctccgcctcccgggttcaggcgattctcctgcctcagcctcccgagtagctgggactacaggcacgtgccaccacacccagctgatttttgtatttttagtagacacggggtttcaccatgttggccaggctggtctcgaactcctgaattcagatgatccacccacctcagcctcccaaagtgctgggattacaggtgtgagccactgcaccaggccaatactttgtatcctttaatccaatcaagttgacactcagtattaaccatcacacaggccatcctcccttttgtccagccccttattgggcaaaggaagcactggccagggaatgctgatgggaacctttgctgtgactggaagagattatgtgctccttctggcctggagggagttctgatctttgcaggccgtattcatccataagcctggatagcggacataggcttggctctctgaggggcacgacttgtcgacttatccctcgggcctgatgcttcctgcttgtggagatagtgccaagagccgtctcacccctgctccctgcttctctcattggtgagttggaaggagcatggggcaagcataactgggccctttcatctctgcccctcgtggggaaaccgggccacagagagcacacgcagggcccagggctgcttgagcagagagcctaattctgggttccgtgtaaagtacacttgccctatgttctccagcttgcttcttacttactgtcatgtaagggggctttcagcccccacaaatgactgttctggcatttcctaatcagttcagtactcaagcaaggaaaaggatgtgattgattgggccttctagaagactccagtaagatccaggctctcttcccttacctggaggggcctcttcccttatctggaggggcctcttcccttacctggtctcttcccttgcctgtaggcagggtctcagcttcctgccccgtggtgtggaggctggaggtgggagcggtggggaaggtgcgtgtgctatgtggggatgcgctgctgagaaggcagcctggcacccattgcgtggcacctacttagtcttaaaaggtaaaatccttcagacaaggagggggatgggcagtgtgactgagatggatgagaccagacaagggcgtggtaaaggaggagaggggagagttgcctaggaggagagatgccggcctgcacagagagaaacaggggctcaggagacagccaaggctggcgcggaaacagagcacttgcttggacggaagcccggcgagcccacactcctaggcgctctgagagctcctaactctgaggaaggcacagccatgcatttcggagcctggataagcagctctgtgctcttcagtacctccgaggccagccccctgggtccaggtaagctgactctactttgtgtgatgcgggccaaattctaccccgcatatcagcagtttggatttgatctggtggagacattgggtggatggtcacatcagatcccttccctgatacagcctaggacgtcccttttctgtttgttgctgttcagccacctgctgaagactgtcttggaggagctctgctgcctggtgggtgttccaggcacgggctggccgcatggcattttgtgtgtttacatggtctccacatggtggcgtaggcagccgagagagccaggcgcagcgtcaaagccagcccagcgtatggactccagctattcaagcaaaaaggagaccagccacccctctgttgcagcggcatgtgaaatgtcaagggaatgcaggaagcaaaagtagaaactctagagtgatgtgctttgccaagcatgactttagaattagcagcaagaccttgaattagagactcaaccccctgaagccacagagtaatttgtatacccttcagtcattccttcctgagccacccctacacaggtgagctgaccgtactttggtgatgcgggccaaattctgcccggcatatcagcagggaaatagagtccctggttttgcatctccgctgttgcaggggagctttgtttcaacggacagcttgctttgttctgagccttccgggaacggcacacactaaagtggcacttagcatcaacaagtgtttcaactggctggatctgttgttgttgttgtttttatttcttcagtggtgaactgctggctcaccggaacatagtggaaggatgttttttgctgcctgaacgtgagcaaatattggacctgagatcggggtgggctccggtccccacctgggtggaccggacagcctcttgggcttctggtaaaatgagttagctcttaaattttcacacatataaagcactagacttgctaccgtgaatgatgtaagagatcaccgtgaggaggagggctcctggaagcttgccccgtcgcggggaaaagcgggtgcaggatggggctgaagtggattctcctcgcggtgttggaatggacctgccgtgtcatgggaagcctgtctacgcacttatcctgcatgggattttcaagccgtttataccagagaggccacagaacccttggtactacagagtggtcgcatgttaaggaaccttgaggggtgggccttatgtcctgcagtggagcgccactctccgagccactctctgtcactaaacacgtcttactgggcatctcatgcatcagacgcgatcccagggaggcaccagtgttgaactgactgtcaaaggaggccccacagagaaggtggcatttgggcaaagacttgcagccggaggggctgtggaactgtcaggggagaggaggctgcaggacagggagctgagagggagcaagggacttccttctacaagtcaccaaggagctgtgggagtgggggaggacatttgtgccacgtccattacacacttgaggtcggaaagtgggcaaatgtggtggcactgactgggggttcctggggtcactgggctgatgatgtgggggccattttgggaatttcagtttcccctcttttttttttttgtgacagggtcttgctctgtcacccaggctggagtgcagtggcgtaatctcagctcactgcaacctccccctcccgggtttaagagattctcctgcctcaccctcccaagtagttaggactacaggcacctgccaccatgcccagctaatttctgtatttttagtagaggcaaggtttcaccatgttggcaaggctggcctcgaactcctgacctcaaatgatcaacccaccttggcctcccaaaatgctggggattgcaggcgtgagccacctcacccggccatttcccctctttattcagtaatcaggggcacagaaagaggtcatcttgacaccattgcatgttcatcatatctctatgaggaagagacagcttgctgggtggctgtggcctggtcagctctgcacccgcccctcctcatctgcagttattgagagccaggctttggtgcccgcagatctgggtgggcccgcttccttgtctgtgaagtgaagacaacaacagtagcttctgcgcggggctttgttgagactcaatgaagatgcgcgcgtgagaagcttagcacaggggagagctgtcattgtgtttactgcagaataaaactttttcttaatgataaacttgggccgagtttagtttcaagagtgcagcaaatcaagaaatctgggcattaaaaaaaaatctcagaactttaagaaatacattgaaggcatatacaaatttcagttgtgggaaattattcgtttcttgagaaatgatgggacactgctttccattagttacttacaatgtgtccctggactgtgaggtcgaatggccatttttgtttgtttgtttgtttacttctggcgagattccattgtcaatagcaccgagtaatgaacagatctgaagtgactcctccatatagaagcttagtttgatgttctgtgcattcaagtgttacaaactattccctcccttttataaaacattttaaaatcttctggtagaataagaggtgagtgccgagtgcctccgtataaataatttactcatttatggctagagtatcacccgctttctctctgtagagagcaggctgtcaaatattatcctcttcctttgaaacctctgattcttctacagcagctcactgtccataaacagtccctctgtgtgagaattttgaacacaagtcttctttcacgtttagcacaacatgcttgtaaagacaaaagagggatttcctgctgccatctgaacatgtgcagtgcctgaaggagagtgcgtgctctcagctccccttaggatcttagtgtcacttccgttaacttacttaggtcctacctgatattataactattggcactagaaataggccagatcgcctcatttttattcttgaaaagattaaagctgcaacaggagccttggtcagagagtctggagtgaggcattagcaattttggattcaggatagattgtaagttattaagtgtgtgaccctgggcaagtcactcaattgttagggctttatgttcttatttgtaagataagaaggtcaaataaaaaataaaaaaggttttacctgggtctcagactttatgattccatagtaattgagaggacaagttttgttccatcattgcatttttttcttcaagtgcaatggcccctggtatacactggattggttccagcattccctgagtatacccaaatccgtgcagactcaagaccctgcagaatccacgtacagtaaaggctggccctccctgtgcacgggtttggcacctctggaatacaatcctatctgcatctggttgaaaagaatccacgtataacgtggatctgcacagttcaaacctgtgttgttcaaggaccagctgttcaattttcaagttcaggctaagttgcatgctagtgggaccctcggagggtgcgggcaagaactgactgaaagaaccatccagaaataaggggtacatttaaagtcttccatgtgctgttagcaaatcttcagagactctgttttgaggattttagttttgaagggcacagcattccacagggaaagaaagacctgggctactcatgttgcacattggctattcttttcttttcttctttctttctggtgacagattaaaaacagagtaacctcctcttctcaattttggaagtagaaagaaattgggggaattatgtgggtaaacgtgttattcttttcttttttaaagcatttatctctttttgatgattttgtttttgcttatctctttttgatgctgatgaggtagaaacctatttttcaggaattactggtaaaaaatcagttccctattttctaacataatagtgttctttttgagtttaattcctgcagttcttgggctcgcccttcatagtcctcaagaagtgggaatacccccagaaagaggaaacggaaaaaggggaaggggaggaggaatgcagaacccccgctccagccccaggggatgtgtgttcctgagaaatggaagtcagaatctcatccctcactccctggtccacagcctcggaatccgtgtatgtggtctccctgcagtccatgaactctcagggccggagccaaccagtctacagggctgccctaacaaagcgaaagatttcaggtatgtttctaaggatgcatttggtcaaaccatagtctggtatgaatgctatgttgtttccaaatgatgctggctgaatgatgaattacatgaattttattgaggctaaaagaaataacagggcaaatgtggtcacattttgggtgtaagcgtgctgcttttatatgcaaaggctagagtgctcttgtgatggaatacatttcactgtttattttgagccacttcactgtgcagcagatttgctgcgataggagcagccaagcgttcattccagtaaaggtgcagtgtgacccaagcctaaattgccctgggtgatgcactgaacgacgtgagagagaaggaagagcaggcgggaggtggtgcatgcaagataagtacacacatgttatttcagctatatttgcattaaaatggcattgagaatcctcagaaaaagcatcatagtggtttgctgagagcctgatcattgtccacacggttacatttcccacgtcccttcacaggcattttctatattcctgatacattaacaaatgacaggtaccttttctggaccacataccttaatttaaagaggcaatctacaacataattattttcatgagttcacaacataaaatgaaagttatacttttttacattgtatgaagttccacaaatacaatgtttctctcttattattgatgaattgctgccataggatgagtccctatatcacttttctagcaggctaaatattttcaccttcccctgctggtggtaaaatccacatccttttgaaacacggtccctgaaaagtgaaaagaaaaaacgaaacaaaaaactaaaacaaacaaaaaacccaagagactacagagtaatattgaagacatcttgtgagtcttttgaactaagactataagctttgtgactgtgatatgttctattgataacaaagataaatctctgtaagaaattggcaaactgacttctagttcatatctgaacatgttttaatctgtcttggactcacaccttctaaaatgtgaggacatcaaacccaatgtgaatcttgcagttgtttgaaccagaattttcatttcatgccatgatcatcaaggaaatgtgagttgagctttccttctcctaaacttttcttcccatgaaaatgttattattttccagaagcttacagtgtatattgagaaagcactgagttacttggaccatctttcacctaggcaaagcatcccctttgtactgttttatatgtcgattgggttgggcagcttttaaagtgaaatactcattttttttttttttttttttttttttttgaggtggagttttcgctctgttgcccaggctggagtgcagtggcatgatctcgactcactgcaagctccgcctcctggattcacaccattctcctgcctcagcctcccgagtatttgggactacaggcacccgccaccacacccagctaatttcttatattttttagtagagacggggtttcactgtgttagccaggatggtcttgatctcctgacctcgtgatctgcccgcctcggcctcccaaagtgctgggattacaggcgtgaaccaccacacctggccgaaatgctcatttcttagcctgtatttaagaaatgcaagactgagatttttgtttttctacactgaccaatccaataattgtttacctttctatcaatttcattttgtctacattacacacaagcaatctaaaacttatgcagggtgaataatagcctgtcaaggactgaggagctcagggcagaacctgttgtgagagaaagcctttctctgggtctcgttgtcatttcagaagaggacgaattggatgtacctgacgacatcagcgtccgggttatgtcatctcagtctgtgcttgtgtcctgggtggatcctgttctggaaaaacagaagaaagttgttgcatcaaggtacttttgcttatttatttgtctttatatatgagagatggggtttttctggccctgaaaagacatgtatttaatgattttattttctgacttacatgaatgctggtctcttttgtagctgaatagctgaatggtaaatattctatgacaatctagttaatcccaggtgtgctcacacatttcccacaaatcagatgttagcagggcctcgtgtgtagtgcacacagcaggaattcacatctcacttgctcagtgatttatcttgtgtctggaaatttcctagattccatttctttctttgcctgtgtttgtgttttgctttctctcattgatgttctgttcatgcacagggtccactttgggaggagtctcaccattcctcctgtgatccaggaagagtcactgttagatggactttatgtagagtggtggacaatgtctaatgccttacacttcgtagttcctcattagactttgctgaacactgacttgcttcatgtctggctcatttatacataacaaaatgcaccttatcttctcttaaaccatgatgttatgctattctgccttttatattcatttgcaacagcaataaaaggcaaaccaatcataaggttaaaatatttttatgttaaaagtccactagtgaacatcatttctagttagtggtagattagtatagccatgaaaattttatttccacgactgaatacattaagtaaccaagagaaagccacagatgtggtggtctggttattatatattaacttttcaacctctctgcaaccaagaaaggggaatatagtttaaaacgaatgggatatgatgacattatatatatacatatataaatgattattcatgttagatatatagtttccttcactgtctgctagtaaaaaagatagctgcttttttttgaaagacctcagaagattcgtagcaattctctccctagccatatggtcttcttcaacatgaagtgttccttttaccattggactttgatttccaacatcttgctgaaaccagagaaggcttgagttttcttagcagaactgttgtgttaattggtgtcctgtgtcttcaactgaaatcttctcttaacatattcagtataacaaatagcacattttttaatgtatcaaatgctttctactgcaaagaggccacaaagacaatttctttgaaagggaatctaataaatggcatttgcagctcttagagtgttgagggtgtccactgtcaggggttgctgaactgtccatatttggtcatactgtatttctcccccgataaccatgcaccacagttccttttataggtgcctctgtcctgctctgtttgtttcacattttcactccttttcactgtagtaagtctactcaaaaccacatgttcccgttcctcctgaacctatggaaaacatgcctgatttgggatgaaatgagtcttttttgtctttcttttctggagagctgagataaccttgggccaggtccctactagtgccttgagtagacacaaatacagacacacacacacacacgcacagtcacacacacacaaacacatatccctgataaagtagttgcctcataaaagctgtctcccttctctctcttccctttgtaatctctgcttgctcttttgaatggtaagattttttggtcttgaaaagacactaagctctgtttttttctcccactttagacaactttgcttggaactttgagccaataacatagtcaaaagtttagatttttctcctctttgattttcttacttacctcccaaagtcatcacttatgaggaaggaaaaacagcgaggcatctagtgttgagtggcagagaatttggacagatcattgtgttgtgttttcttacagacagtacaccgtgcgctatcgagagaagggggaattggccaggtgggattataagcagatcgctaacaggcgtgtgctgattgagaacctgattccagacactgtgtatgaatttgcagtccgtatttcacagggtgaaagagatggcaaatggagtacgtcagtcttccaaagaacaccagaatctggtctgtatttgaaatggcctttgaattttcaatttgggaattacacccaaaataagatttaaagacaatgtaagatgccaatagtgacaaaggccagcgtgggcatttttgaaagtcatgttaatcctaaattttggtagagtttctatgcgtacatgcaaagaagttaaggaactgttttttgggtccatgttttaccgtttgttggccttttccactagcatgttgttcatgttgttctgacatgtggagcacattaaatcccagtgtgtagcatgcatcagtcaccattgtgtgcgtgaatgcccccaggtgatggatggctcttgcatgtaggagagcctctgctttcctgaggctgaggttgcatttgattctgggaaaaattttggtctgtatccaaggctaccattcttttctcttaaactatgtctttcaaagtttcattaagaagaagttggaactggatcttaatcttctttgtatatttcaatatttggcaatgaaagaaattctgaattactaagaccatttccctagataggtctaaactcactaaatgaactgttgtagtgacataaatcactatattacacaaagaaccagtgtggaattttctgtcaggtataataaaaattaacacagtaggtcttcaatttaaaaaaatgtgtacctagagaccatgtgctatttacatctagaatgtccggtaaggcatttaaaaatgtttctttccttgtcattttgtagcccctaccacagctcctgaaaacttgaacgtctggccagtcaatggcaaacctacagttgtcgctgcatcttgggatgcgctaccagagactgaggggaaagtgaaaggtaggaatctcactccctaaactgtaagatgcattgattctgatgaacatggcctctgcttacggctttgttgactgaaaaagaaatagggaagcaacatatgtctaagaggtgctcacccaagggacgaggatatttcatgcaagattttcattgcccaagatccaagcagtcacgaaagtgactattcttttcatcctcctgtgaaggctttttgctgttgctgttgggaaggatgtttttcattgcatgggtgtgacaacataaccttttcccatctgaacaacaccctggcttccatgctatgggtcttttcgttgtgctaggaagatcacgaaagcaggtgtcagcaggaatcctgcagagccatcagtatctttcatgggaccataaatacatttaatgggtttgaaaaactcaagtaataatcgctggaaaatggattgattccctatttgtcaccatttgtttatgtatttattgatgtcaaggaaaacataacaccaaaatagcaaaaaaacctagatattttaaagaataaaaatagagtaaaacattcacaactagttaaattttaaaatagtctgttgagaatactaaataaacatgaaaatcttttatttttaatgtaaaagcgtttaagaacctctcagaatctgtttggagacattttaaagagccatgctgaagtttttcctggcactgcctatgcaaatgtactctaagggtaggaaggaatggaggttttattcaagaaagaaataatttttattgttattagattgaggggcaactttaagtctaatatgtccagaaactatgaaatgtttgtgtaagcttaaagaaatccagaaaattactactagtctcctttgagaatttcttaattgaaaaaactgaatggttctcttttatattcatccaaaagttatgtttgctgacatgtaggatgtcttttcttggaataatagaagttaaggaaggtcgatgtggaactgtattttctatacttcacgttttttcactttttttttttaaagaatagattgtactattcttctttctctttttttttttttttgccattggaataaatccacaaccagagaaaaatattaatttggtccctttaaatcaggggtgtacaatcttttggcttccctgggccacattggaagaagaattgtcttgggccacgcataaaatacactaacactaacgaaagctgatgagctttaaaaaaaaggtccatgcattagtctcataatattttacgaaagtttatgaatctgtgctgggcctcattcaaagctgtcctgggctgcttgcagcctgtgggccacaggttgaacagcttgctttaaatcattctttttaccacaatttgaactttaactccctctgtattaagtattgttgtgctgccgagaagacctctgaaaattgaataaagactttttttttgctaactactttttgttagttaaaaaatgaaaaggtaattattgcacctctggtgactttattcccatgctacttatgtactcttcctctctccctcatctgagttgatatttacagttccttggcgaaagaagttccatggtagtcaattaaatattgcagaaataataacagatactgagtttttatgtccaaaagaactcgcgtatcttaagcctgcttaggtcgtttttgtaagggtgtagtggtgagattaaaattaataattttctatgtacaagaaatataaaacgtaatagaagaatatactttgacaaggctaaatttattttccagatggatttaatttattttaaaatttgaatcacaaatttttatagacaatgggttctcttaattcttacttttgaccaccacaaatgacaagtttgttgattttcaatgagaaatgaatgctgttttttccagacaaatgctgcaaaagcatttttggttgaaacgttttttttttaaataaatatactttttaaagattggagctaagggaaaagaaaagatcatccatgctcctgataattcttgaattttctgtgattaaagttatttttctttgttcctactcatttctttttctttttattttattttttgagacatagcctcacttcattgcccaggctggagtgcagtgtgcaatctcggctcactgcaacctctgcctccagggtccaagtgattctcctgcctcagcctctcgagtagctgggaccacaggcacacaccaccatcactggctaatttttgtattttaatagagacgggggtttcaccctgctggccagggtggtctcaaacttctgacctcaagtcatctgcccgccttagcctcccaaagtgctgggattacaggcgtgagcaaccatgcccagcccctactcatattaatttgatgttttgtaaatcttgggttcattgagaggaaataggcatgacagtttttagttgaaggcaaaaattattttttaaaatattattcccttatgttataacatttccatgtgagcataaacatattttagttccttgaactgaatttgctttggttttccaaaattcagggctattatgtgactatagagcaagccaattaaagatggaaacattagctatcacataaatctattacttaacaacttttcttcacagctctaaaatactgtgaaatatctttatcaggatatactaagaacttttataattcctacaaaaatgaaattatatttcaaatatggaatttttctggctaaatgtgctaataaaaataacccaggttaataaagtaaaactcttgaagatgtcagatgctattcaggatccattcctagcagttgtcacttctttttccttagtttattctatcaggacatatcaatcatagcaaattagtaaataaatacaattttagaaacccaacggtgtgtaaatttggggggaattgtatgaagactggcctcctggctttcatatgtttaatttgcctaaaatggtgaagtgtcagctaattaaatacatagccctgtgtggttgcccgaatgaatgtgagttcaccttctgctgtgtcttcatgctccagctggtgacttggcgtgcattgctagtgtattaattttagtaatgcacgttctaattcgtcctgcccatacagtctgtctgctggacacaggactgttttcagtttcctccttccaaccatctgccaaatcatttcagaatacattctttcatacgccccggctctcaaaccatttggagcaaagtccctcacctatcctggagacactacttctgccctggtggatggtctgcagcctggggaacgctatcttttcaaaatccgggccacaaacaggagaggcctgggacctcactccaaagccttcattgtcgctatgccaacaagtaagcattatgtgtctgtggctgtcttctctctctcttcattcctgctgtttgttttgtgttcctttgaatcatgctcttgggtttggaactgctcagcagatgatttttccaggctaagttgcatattgatttttaaaatatttttgtgtttcctttagaaattagtcttctcaaagattaaaatgttattgattattgataacagttactatttcagtattattaatgtattaattatataattaatctgacatcattatttaactttaggcttgtggtaacagggaaagaacatttttacaaatggtagtgtgacatttttcattgtcagctctcttcaatttctatgtagctttaaaaatgtttagtttgcaaaagcagaaaggacaggagacgggtgagggttaaaaaaattacccactgggtacaatattcactggctgggagatgggttcactggaagcccaagcttcaccatgatgcagtatattcatgtgacaaacctgcacgtgcagcccctgaatctaaaatttaaaaataagataaaagtaaaatttttggtttgtattccattatttaggaatgcagctgtacccagaaggatttcagttgtctagcttacctgatcgatatccaaaccaaacaagttaataaagatccacaactggaagggagtgtttttggaccatgttttcttttctacttcctcacatttatgctggatattggcggcttttccttcattatgtgctatgaagacccatggtagactgcaatattagacaattttgtcatggaaaaatctgtgaaatggatgacatttgcccctccggcactctcactgcaatataggttcctctcccctatagaatctcttccctcagtcagtctgctctgaagacagggtgattacagtacatttaatataatgtttgcctatcccaggagttttttttattttaagccttattttagaattataaatgtgtccactattaatggaattttaaacaagaaggaggaagcaggtaaggacatgctatgggaagagggaaatttttgtactgccttaaaaattacaaattggggccgggcgcggtggctcacgcctgtaatcccagcactttgggaggccgaggcgggtggatcatgaggtcaggagatcgagaccatcctggctaacaaggtgaaaccccatctctactaaaaatacaaaaaattagccgggcgcggtggcgggcgcctgtagtcccagctactcgggaggctgaggcaggagaatggcgtgaacccgggaagcggagcttgcagtgagccgagattgcgccactgcagtccgcagtccggcctgggcgacagagcgagactccgtctcaaaaaaaaaaaaaattacaaattggttgctcgtcacacattccccatcactttgagtatagattattcagcaatttgcaccaggtgtattcatgtttcttgtctattaaggacagctataatgcatttgtaatacactgacaattagttttattaagaaaatcctatataagattttgcatttataaaataaatgagttacttcaaagtactcatttcagaatttcttcaaataataagatgtggcataacctggttcaatagagattcaattcacttatattttctaggactatatttgttacttaaagcaaaatataagttttaaaaagaatgctatcgttgagaaaacacgtttccagtgttctaaggaattagaagttagccattatgactactgatttgaaatgcctccatatgctgttttaaatactgtgtctcacctccgctttcgcttttgagtttcttctttgacaggcaattctttaaaatctgttgcagccagtaaggcggatgttgagcagaacacggaggacaatgggaaacccgaaaaacctgagccttcctcaccttctcccagagctccagcttcctcccaacacccctctgtgcctgcttctccccaagggagaaatgccaaggaccttcttcttgacttgaagaacaaaatattggctaatggtggggcgccccgaaaaccccagcttcgcgccaagaaggcagaggagctggatcttcagtcgacagaaatcactggggaggaggagctgggttcccgggaggactcgcccatgtcaccctcagacacccaagaccagaaacggaccctgaggccgccaagtagacacggccactcggtggttgctcccggcaggactgcagtgagggcccggatgccagcgctgccccgaagggaaggcgtagataagcctggcttttccctggccacgcagccccgcccaggggcgcccccctcggcttcggcctctcctgcccaccacgcgtccacccagggcacctctcatcgtccttccctgcctgccagcttgaatgacaacgacttggtggactcagacgaagatgagcgcgctgtgggctccctccaccccaagggcgccttcgcccagccccggccagccctgtcccccagccgccagtccccgtccagcgttctccgcgacagaagctctgtgcaccccggcgcaaagccagcctcgccggcccggaggaccccccattcaggggccgcagaggaagattccagtgcctcagccccaccctcaagactttctccaccccatgggggatcatctcggctgctgcccacccagccacacctgagctctccactttccaagggcgggaaggatggtgaggacgccccagccaccaactccaatgcgccatcacggtccaccatgtcctcctccgtctcttctcatctctcgtccaggacgcaggtctctgagggagcggaggcttctgatggtgaaagccacggtgacggcgatagggaagacggcggaaggcaggcggaggccacggcccagacgctgcgggcccggcctgcctctggacacttccatttgctcagacacaaaccctttgctgccaacgggaggtctccaagcaggttcagcattgggcggggacctcggctgcagccctccagctccccacagtcgactgtgccctcccgagcccaccccagggttccctctcactctgattcccaccctaagcttagctcaggtatccatggagacgaggaggatgagaagccgcttcctgccaccgttgtcaatgaccacgtgccttcctcctccaggcagcccatctcccggggctgggaggacttaaggagaagcccgcagagaggggccagcctgcatcggaaggaacccatcccagagaaccccaaatccacaggggcagatacacatcctcagggcaagtactcctccctggcctccaaggctcaggatgttcaacagagcacagacgcggacacggagggtcattctcccaaagcacagccagggtccacagaccgccacgcgtcccctgctcgtccgcccgcagcacggtcacagcagcatcccagtgttcccagaaggatgacacccggccgggccccacaacagcagccccctcctcccgtcgccacgtcccagcaccacccgggaccccagagcagagacgcgggtcggtcaccttcccagcccaggctctcactgacccaggccgggcggccccgccccacgtcgcagggccgctcccactcctcctcggacccttacacggcgagctccagagggatgctccccacggccctccagaaccaggacgaggatgcccagggcagctacgacgacgacagcacagaagtcgaggcccaggatgtgcgggcccccgcgcacgccgcgcgcgccaaggaggcagctgcgtcccttcccaagcaccagcaggtggagtctcccacaggcgcaggggcaggtggcgaccacaggtcccagcgcggacatgcggcctcccccgccaggcccagccgacccggcggcccccagtcccgcgcccgggtacccagcagggcagcgccggggaagtcggagcctccttccaagcggcccctgtcctccaagtcccagcagtcggtctcagccgaggacgacgaggaggaggacgcgggattttttaaaggcgggaaagaagaccttctgtcttcctctgtgccaaagtggccctcttcctccactcccaggggcggcaaagacgccgatgggagcctcgccaaggaagagagggagcctgccatcgcgcttgcccctcgcggagggagcctggctcctgtgaagcgacctctccccccacctccaggcagctcccccagggcctcccacgtcccttcccgactgccgcctcgcagcgctgccaccgtgagccccgtcgcgggcacccacccctggccgcagtacaccacgcgcgccccacctggccacttctccaccaccccgatgctgtccttgcgccagaggatgatgcatgccagattccgtaaccctctctcccgacagcctgccagaccctcttacagacaaggtagtttattttttcaaacagtctttctttaaggtgttcagtggtgttcatggcaatgcctaagaagtttttattctattgcatttagcacctactatgtccacgcaccgtgttaagagctttgcacatgtgacataatttcatcctctgaacggtccctagggtttgcattgttatccctgttttccagatgcagaagctgcggctcaggatctgaggggcttgccctaaggcagacacctcagagttgccattccaattccaaatggcctaatttcacagccattactaacccacattgcctctaattccacagtcttttcactgtcctacattgcctctttgaattctttggcatacactcttaacctgtgaaaatgtgtcacaaccatgatgcccaactcaggttcttcttagttgttcaagtgccgccatgtgtttaagggatccatagaagctggttagatacatatgtaggcttatcttgttcttgtctttatcttgttctcatcttctgcatgcaaaactctcaaccaaacaaaccctgagacaaactcagatatcttgggtatgaattgctcagacagtgcaattagtgcatgttgtctaaaacctccagaaaatgtatgttaaagatcattgtcacaaagaggagttacaggcagatgtgtgctttgtatttctataacagagggttgaacaaagtccgctatgaactggaatttatgtccagggcagggtccgaggcatttaccataaatttgcattcagttaaatggtgctttaaaccctccttgtatgtaattggggctttatagaacattcttgaatgaatgtattttttttttttgcagatctgtacaatgcattgttattttagcccaatgtaaagacatagaacaatgccccatatcaaactcagttttccactaagattgactgttttaatcaaacctagcaccctgagagtagatgtaaaactcaacgttcccttgtatatagcaggaactccataaatatttaataaataaatgaaggaatgagagaaataagtgtctgacctgcgagtagcggtcagaaagcccaagcactttgccgagcggtcaatgctggaccagagtagactggagctgatgagaaacatctccatgtgaggcagagacagacagaaacaacaagtgtaagggtgctgctgcatcttcttactgtctgagcaaatacttctcaagcagccccacagcgttcagcaagctttgagacagcattgtgcttttatactcggcgattggtgattgggacctgagtcagctgggaatagctgtgtttagtttaacatccccagaaaagtgggacagcatctagtacattttagacataattttctctatccttccaatccttccttcctccaacttccacatggctaaaataaagctacagctactaagatcttaagttttctatggcaaatttacttatgccacacactctcattcccacagtattgtcagaaagctgtgactttactgtattcttaattgacattcatatctgttgtggagaagtcataatttgagactatcattatctaatatatttgagctattggtttaaaattctgtttagagcttctatttgaaatgatgtgtcactactaatagtttggtatgaagccaacttcccgggcatgttgaatttaccaggctctgttatttttatttttggtactgtgtaggttataatggcagaccaaatgtagaagggaaagtccttcctggtagtaatggaaaaccgaatggacagagaattatcaatggccctcaaggaacaaagtgggtagggtaaacttctttacacatccccgttgttttcatgctgttgagaagagaaaaatggtggacattgtgtaatgataaatgaagtggtctttgtttgttcttcttctctagttttaactacttatatgtacttgtatagagtttattttaatactcggaaaaatctgtggttctcctggtaactagcttgttttcttctcatagccaagataaggcatgggccttcgtttttcatttgccttgactggttaggaaggtcaaatgaatgcatggcccaaccatagcaattatagacccaatggatggccgttcaaaggaacttatattttccctgtcctggtagcttcattttatttttaggttttgtttattgtttgattaaacattacacatattttctgtaagtcatctcaaatcctttctcaaaggacacagggtaaaaataaacaaacaaaaaaccctgaatgatactggaaatttttattagatcatcttttgaatcttccaacaagtgttggactaaaattatgtattagtatttcatgtatgtctaaacagctttaattgcttggggttaagataaatgtttaggaggttttggtgggttgagggtaacagaacactttacaatattcaggaatttaaagtactttttctaagaataaaaaaattatttatactgtaattcccaaccaaaacttcccatttataatgataaggtttagggaaatgtactaaaagactatgacattttcagtcataggtgatctaaagatgcatgttatcatttcttaaaggaagagaaatttatagtaggaagaatgcacattaaagcaaaatgctattgcaaacaattttgaatggaaacagcatggggtagatttcaaaatagagtttatataaattttattttaatgccaaaacaatacccaccaaagtggcttgcttgcagggcttcctccagtagcctgagtgtctaaagcagtggttctcaaacttaagccagctcaggatcactgaggattttgtcaaatacaagtctcgggtagggctgggtgatttgagtatctgacaagttcctatgtgatgctgaggcttcaggtccaggaccatgctttgagaaccaccagcaaagagcacgagcttgttccttaatagagataattatagctttcttcaagttttacagttccttagaatgtgacgttttctgcatgcatactatattaggcaacgtgattacaaattatattgtttttgttacagcaactttgatttttaacattaacagcaaaatggaaagattttatgtctttaatatgctagcaattcacattcattgcaagaagttaaaacaattcatattgaaatatatgaaacagaaaataaacattcttcacccaaactacttctcaaagataaccactgttaaccatttgcggtataaccttccataatttttttctctgcagttttaagcttatatatgcaaatggatatatctttatttttgcaaaataaccagccctgtaatctgagttcacatatacgtagaacgtatgtagaattgtctgcataatattctaccacatggatgggccacaaattatttaatctcttccctcaactgagagacacattgtttccttctttccagcattagacacaatgtacttaatggtaaaaatattttgaacatcttttgtgatttgagaaacttaaaacaatttacatgttatatgggtaagcaattataatatgaaagatgactgttttgtacttttttttttttttttttgagacggagtcttgccctgtcacacaggctggagtgcagtggcgcgatctcggctcactgcaggctctgcctcctgggttcacgccattctcctgcctcagcctcctgagtagctgggactacaagcgcccgccaccgcgcctggctatttttttgtatttttagtagagacggggtttcaccgtggtctcgatctcctgatctcgtgatctgcccgcttcggcctcccaaagtgctgggattacaagcgtgagccaccgcgcccggcctgtactttactttttaagactttatgaatgatattgacaaaaagaatgtcttctactcacattacggtttccttctgtggaagcttcaggggtatatacatatataattggactaatgtgatcatttcaaaatgtccaatatattctttaatctatgtcatggatttaggttgtggaccttgatcgtgggttagtattgaatgcagaaggaaggtacctccaagattcacatggaaatcctcttcggattaaactaggaggagatggtcgaaccattgtaggtaagggagaatggtttttaaagaataaaagcctactgaattagccatagaattacagcttctatcttccttctccccctcatttataatgaatggtcatgggttagttacttttacccatgtgagaagaagagcctcaaaagaggcagaacttggtgtttcccccagagagcgttagttctcttcctgcaggctgcaccctctagaaaatgtggccctttactttgttcttaaattggccctttcagaggaggggtccgcaaactacaacctgtaggttgtagcccactacctatttttgtaagacccatgagctcagaatagtttttacatttttaaatgattgccagaaaaaagaatattttgtggcatggtaattacgtgaaatgcacatttcagtgtccatacgcaaagttttactggaacacaatacactcacttaattatgcactgtctaactcattttttatgtgttgtttatgtattgtctatcttcttttttgcactctaaaagcggattgagtagctgcaatagagaccatacggcctatgaggcttaacatattcgcttcctggccctttacagaagaagttttccacctttaatccaaagtaacacttttcccccttaggcataggaatgaggcaaaggaaagtatttcttcctttgctagacacaagagttatctcaggatcgtggagcatactgatgcaatattcatttatccctttgccttttactgattaaaacatgataatacataagctttgagaagacacttattgcttgctttttattttctctggattgcttcaccttgttgcatagctattggttgattttgtttcagatctggaagggacccccgtggtgagtcctgacggcctcccactctttgggcaggggcgacatggcacacctctggccaatgcccaagataagccaattttgagtcttggaggaaagccgctggtgggcttggaggtcatcaaaaaaaccacccatccccctaccactaccatgcagcccaccactactacgacgcccctgcctaccactacaaccccgaggcccaccactgccaccacccgccgcacgaccaccacccgccgcacgaccaccaggcgtccaacaaccacagtccgaaccactacgcggacaaccaccaccaccacccccacacccaccactcccatccccacctgtccccctgggaccttggaacggcacgacgatgatggcaacctgataatgagctccaatgggatcccagagtgctacgctgaagaaggtaactgcctttgttctaatgctaactacttaccaggcacactagcacgccgcaactcagagcagggtggcagagcctgcaggggaggtatgagcaccgtgcacagcaaagcagcaacccgatgcatttttggtcccagcaggtttgtttgacagtaccatgccacagctaaggttggaagacttagcaaataaaaatattacatgggacatatttatatgaaaaaaattatttcctgttcacttaaagtcagatttaactgggcatcttttgtttacttggtgatgcttatcacaacccaagtcaagaatttagctgaaacttgtgacattatttgtttggactagcatttcccaaagtgtgttccaatggatattgtagattagtggttgtaatatatatgtatatacttaaaaggttctgtgattagctatgtgatttaaacaaggttggataagtttcttactgttgtaatacttagatcactgaatagtcttgttgagaatctccaagaaaaggaatgtttccctagcatgttcggcagctgagcacttttttgatcagccctcctttggagaatgccaatcctcatgtagctgggcttcctgtgggagtgtgggctttccactgggtaagaatgcaccattttcccttctctgctgatctgcactatcctgccgcccctgatgtaagtctgtcttccttctgaaaatggcttgttctccctgaagagcaggagctaggagacctttatccaggtcatcgtggagcccgtatatcaatatatctccatcttttctgctcagtcccctgctcaagctgctttggaagaagtcattctagatttgcatcaggcatggaggagagagattcatcttctttccctcagtttgaaatgaattgcaatgtcaattataaagcttaagtctttttaaaccaaggcagagtgaagatgtttcctttcaggaatcaagctggaattcttatgcaacgttattgactatgataagcccaatcagtttgaacatgaatactgtatccaaaatgggaattctgttggaagttagtctttccgtgaaaaagttacaaataaacaggaaaacttgacacatctaaaaaattcacaccaaaaaaacatggaaacacgtacagagggagaggaacaatgggaagaaaatttctactctgtccattgacccagtgagtataaatttgaatttacctttgaatttctagtattgacatctgacctctgcatgcattaatgtgtttaattttaaagactgaaatataattaaaacataattagtaattggtcgtaaacaaaaattgactattttggatttgattttaattacggctgctattatttcacattttattttgtctgcttttatttaggccttccaacatgttctcttcatctactttatatttttggacttttatttggcatgaaagtcaatatttttcctggcatttttgcctcttattttctttgcaaatcataacatatatatgttcactcctgtccagtctcctgattccctagtcgaagctaaagaataattttcctctggacagcatttgaaaataagtacaaatcaatacacagtcttatggaaaagttaaatgtggggacagtaacatatcatcctcatatcgcattttaatgcactataatttgttagtttaaaaagacttccatatgccctttcttatttctactgtttcactaacaacttcattaaacattttcttctttattaactgtaatcatagttatttttatcttttaatctttttaaaccactttcttgatgtatgcatagaaaaagttctgcatatttaatccatacatgtcgatgagtttgggataagaatacattcacaaaatcatcatcccgctaaggccacagacacatccatcacctcccaaagttccctcccactcccactcctttattgttagtattcttcttttttctttctttatagtaagagcactcaccatgaaagtggtatttttttgtgataagaaattaaatttttactattacaaagatacatgcacatgtatgttcattgcagcactattcacaatagcaaagagatggagtcaacccaaatgcccatcaacgatagactagataaagaaaatgtggtccatatacaccatggaatactatgcagccataaaaggaatgagattatgtgctttgcagggacatggatggagctggaagccattgtcctcaccaaattaacacaggaacagaaaactaaacaccgcatgttgtcacttgtaagtgggagctgaacaatgagaacacatggacacagggaggtgaacaacatacagtggcgcctgtcagagggtcaggtaggggaagagagagcattgggaaaaatagctaatgcatgcagggcttaatacttaggtgatgggttgatctgtccagcaaaccaccatggcacatgtttacctgtgtaacaaacctgcacatcctgcacctgtaccccagaacttaaaaataaaaattaaaaaaagaaattaaattttaaaaatgtattaatactagctctgttgagataaaattcatataccataaagttcattcttctaaagttagtggatgttaatatatttacagttgtgcaatgatcaccactattagattccataatattttcatcaccccaggagaaactccgtactcattagcagtcagccctcattcctccctcctcccaacccatggaaaccactaacatactttctctctctatggatttacctatttgggacattttgtataaatggaatcatgtcatatgtggctttttgggtctggcttctttcacttagcataattgttttcaagattcattcacattatagaatacatcagtacttcattttttttattccattgtatggatatacagcattttttccattcatcagtcagtggtcatttgggttatttccactttttggttattgtgaataatgctgccttgaacatttgttttgtttgtttggttttgttctacttgatctgacttctctgttggataataaactccttgcagttgagacaatgtcttctgcttcatctctaattccttgtggtacctaagtatgtacctttggatatccaagcaagaccttaaggtataggcattttccatgtcctaaaagccagtgctctttttttttttcaggttctgtatctacagcaaatctgataatagatgatatatatggaatgtgatgagccaaatgaacatcttcaagaatttgtagcatgaccttgttaaaagttgcagaaaaacatcagtcattatggaaaacagatcttccccaccacagctgggtctccagatagaaaatactgagaaattcaaaaattcatttgagctggaccaactgtacaatgtgcaaatatccctgagtttcaaatggctgtcatttaccttctgtctctaaacttctactgagaataatttttaaaaatattttgtaatatctctggagcaaaagccttacttctttggtgacatttttcacttatttttttcatgtctacttgataaactactgaagagaataaacaaaacgactatggttgatggctggcaactatgtttatgtgaagaggctgaagcttttcacattggtgctgagttgacttgtaaaatatccagttttacatagttctgaatggtttaaaatgacattcaggtgggccaaagtaaggtggtcaacttttttttttaattgtaaatatatttcattacatctgaaagttatttttacttggagccaggatggttctattttagaaaaattatgcctatgtttatttggtcttaagaaaaagaacaccaaaatcacccagtagattgtttacttaatgccagaggacttaactgtcactcatctcaggaagtgaactcatttgctggtaaaagcatcatttctgtggcctgctgcatgcactggagtatttcagcacctcaaggagttacccataacaccagagtccatgaaggaaatgatatacttttcccttttcttgttcaccctgtgatgcaaaaaccttacaatgtatttattttttatctggcgaaaagcaataatgaaaagaaatgacactgaactgataatgaggaaaagcaagacgacattcctaaaggttaaattgacaagggaaagaaaatggtaggccaggaaacaatggcaagataatcccaaagtttacagggtgtgaacctgaaaactgatttgaataagctcagaagtaatttgtcttggatcccaggtatattgacattggaatgaccaaaggaaagtttgtgtttaatactttttcatgaaatggccattccacccctaaacggatggataatttacaacttctctctgcttaacattcattggctgcatcagaacacaccagagtcattgcctcaagggccatctcttgggcctcagaataggagctgggggcttcttactgtgatcccaggagggctggacagactactcgaggttgccattgccctttgtgggtggagtttgtttttacaatgtaatattcatgtcattcaaactaggctaaaaaggctggtagaataatgacataggagtttatataccttctacttcaatttccccttaattacactgtggaatggtgattttaatagagcatcttcatatttacaaataattttattggttagttcaacttttaagaagtgggggcagttttatgtagtataaagtaagtagtctttggagccagagtacctgaagttcacattctctttttgctgtcttttaccatctgcatgtctcaggcatgctgtaaatcctcccagagccttggtgtccttggctgatgtattagtccgttttcatactgctataaagatactacctgagactggataatttataaaggaaagaggtttaattgactcacagttctaaatggctggggagacctcaggaaacttacaatcatggcagaagggaaagcaggcacatcttacatggtggcaggcaagagagagagagtgagagcgagaacgagagagcaagtgtgcaggaaaaactaccatttataaaaccatcagatctcgtgagaatttactcactatcatgagaacagcatgggggaaactgcccccataatccaatcactttccaccagatccctccctggacatgtaggtatcatggggattataatttaagatgagatttgggtggggatacagccaaaccatatcagctgagaagtgggtatttataagctcaatgtatctcaagcgtttgttgtgaaattatatatacataaaagtggctgatacacagaagacatctgggaaatcatccactagtcacttcttcctgttttccccaccttgcccccttttgagggtgcattaagtttagagagttctatttaattgctgtgggcttcaggtcaaagggaggaaaggaattcctacaattttttttttagctataaaaccttttgcctcaagattttatcagctacagtgagatgttctcctttttacagctacatctgtatctcccaagtagagaaatagtataatcaattccatcacatctttcccaaaagacttctgcttaaactaccctgataatggaggtgaagatgccttttatgcttaaatcactcacctttcttaaatcactcatatgttacttatgctcataatatcagtttagtcattatggtaattttttttttttttttttttttttgagacggagtctcactctgtcacccaggctggagtgcagtggcttgatctcggctcactgcaagctccacctcccgggttcacgccattctcctgcctcagcctcccgagtagctgggactataggcgcccaccacgacgcccggctaattttttttttgtatttttttagtagagacggggtttcaccaggttagccaggatggtctcgatctcctgaccttgtgatccgcccgcctcggcctcccaaagtgctgggattacaggcgtgagccaccgtgcccggcgtcattatggtaattttaatagttcttctaaccagggtttcctggcttttccaaaaatcacatctgaaattttatattacatttaaagtataattctgtagtcaaaatagatctattggttagtacagcccaatctgtaaagggaaatttgcaatgattggcatatgtttccaaatttcctatgcaaattaagaaatctgatttatctcctgagtcagtgagagtgggtgggaactcagtaggaagtggagaagcacaaggaactctcattggtagagtttgccaagttgggatgtagaagaggtaggaaattaccctcttctagaatattccagaagcaagatggaggaggtggaggaatgaagactgatgaacaggggagttcacatgtgaggggctttttgtcaccatcctgagcaccaaccgcccactctcttctgtctctcgtgactgcttcctgagagcgcctgctgtggcatgaggggccaggggccttccctcagcatcagagccctgcaggcatgcgggcgagtgggctgaggtggtgggagggaggtgagagagagcttggtggtgctgaggagtctgggaacgtggagtggggtgtttgctcctaatggggcaggcatttgtatcgccctttcctgggcccaaaggagagaaagtctgggttccatttcagtgctttgatgattttcctcctgaaaaaattatggagaccctggccttggggacttgttttcatgacctgcttgaggtgaatgaattgtcacgctctggggcctgcttctgagagaaccctggagaaggagcgctggatgactggtccttttctctgtcctcactagatgagttctcaggcttggagactgacactgcagtacctacggaagaggcctacgttatatatgatgaaggtacaaactggcttttgaaaaattatttgcacactttctttcctaatcaaaggatctgattgtaactattgagtggatgatcttgatggaagtttcctttagagctttgggccggtggcaatgccgagggctggcttagggaagggtggttgtaccccacgcttccttgtcactcccaaatgcatatttgatctaagaaaaacagtgtgcttaacacgtagatgcagcttcctatctggtccctgtgctccccgttccctccctccccaccctccttggacccaaggaattctggagttatccatctgggctccccttcaacctttatttataaaacttacttgtttaaccaagtccaacttccttacttggctcttctctttcttattcctttcttttctctccttttctaattacataaaatatgtgatgcttagatctgttgatttcttatcatagaatcttttcaagggtaggtttgtaagattaggatcagaggccggccgcagtggctcaagcctgtaatcctaacactttgagaggtcaaggagggaggataacttgagcccaggagttcaaaagcagcctggacaacataacaagaccctatctctacaaaaaattaaaaaattagccaggtatgggagcacacacctgtaggtccagctacttgagaggctgagacaggtggattgttttcagcccaggagttcgagctatgatggcaccactgcactccagcctgggtgagagagcaacaccccatttcaaacaaaaaaaacactttttttttaaggttaagaatacaaagtgccttggacagcatctgggagagtcattcaataagtggtaactagtggtattattacacttaggaccttgtgattgttttgtgtgatttggaagttgcctctgcagttgaagaagttcttaaaggaatcttgtccacacccagtgccggcctttgacaccagggctcaggattctcacttttgaggtccaccttttctgcaattattcatagctctaattgtcttaaatcacaactgtgcaaacaatgtcacctttgatgtgttatttattcataataaagctcgatgtagtggtttaatcccaaggttttcaaacaaaaactgacttaaaagaaaaacagcagatgttagaaagcaaacgaagatttttttagcacctttgaaaatactaagcatctttcttatctttgaacagtttgaaaaaggggcagttttattttctttttcaaatgttaaaggattagttgtcttggcaggattaatcccaccccccatgcccagaaaaagttcatacatgggagaaaaaagaatttttttttttttgagatggagtctcgctctgtctccaggctggagtgcggtggcgtgatcttggctcacggcaacctctgcctcctgggttcaagtgattcttttgcctcagcctcctgagtagctgggactacaggtgtgcgccaccatgcccagctaatttttgtatttttagtggagacgggctttcaccatgttggccaggatggtcttgatctcctgaacttgtgatccgcctgcctcggcctcccaaagtgctgggattacaggtgtgagccaccacacctggccaaaaaaaaatttttaagaaaaaacttcaagtttattttttgatgttaccttttattctctaaaagggaacattatgcaggtagagcatggctttgggccagtgccatgagctacaaggctacagtggatggattctaaggttctctccagctctgagtctaaaaccccatttttctggtcatatgtgtttctttttgccctttctttcttctgtctgcagcttcttttctgcagggacagaaatgggaagaaatagtattttagtagaaacaaattacgtttgggcatagcatttattttagggtgtgtgtgtgtgtgtgtctgtctgtctgtctgggtttcagcctacagttgaatgtaagaaggtatcatttgactatagacagtgctccttttctggcagtgcccaattacagagccttcatatcatttcagattatgaatttgagacgtcaaggccaccaaccaccactgagccttcgaccactgctaccacaccgagggtgatcccagaggaaggcgccatcagttcctttcctgaagaagaatttgatctggctggaaggaaacgatttgttggtaaatataatgtccttaatcagagaaacatgggtttttaacttgtggtctttgaagaaaaacattactaatcttttggcctcgccaaggcagtgcattttgagaagtttttccagaatgaagtttccactggggataattgagtgagtcagtcttatgtagatatgtattattttgctttctgccaaaatcagaagaggggaggatttggtgtccaacagagagagctgagagagactgccttgcatagactaagagtaagaaacacttaaaaaccatctggaccagggaacatgagtgtttttattgtagccagtttttctacgacaagacttaccactgggccttgtgtgtgtactgtctgttaaattcttcctaaaaggttagccgcttactgaattgagccactagtgcctataatgtcatgaaggggaagcttttttctttagttatttcctatcactttcattagcttcaaggatttgggatctagaaattcattttactcttctttctcagtaattaaaacagtttcaataggaaattctgtgaaactaaactgcattaagtcttgcaagtcttcttttcccatgcccttaatgaacctcattaatgagacagctggattaatatattactaagtggagacaagcaacagcttaaactaatatcacacttttctgtttccaaaacaactgttctgccatgagcagagaacagctcttgctagccaagatgtagtgactgagtgtctaaaccacacgtacttgaagaacaagaatattaatttgaggtggcgttcctgaggcagacactaacacgggtctctggcatgcagctgccaggctgcgtttaccacatgcgctgacttctctcccggcagttccatgacgggaattgaaatgctttctgtggtattattagctgttccacagaactcctctaaacgctaaaggcttactattgtctggctcttttcataagtctacaactctctaaagcataggagcccactccccaaacttcctgataagacccatggacaagttctaaaggcctagcttcagactaatttttggaaaacactgccttagctgtgtcccagggactctgtatctttgttctcattagttacaaagaacttcttgacttctgccttagtttcattatttgcccaaaagtcaaatagagaaactaaaaactgcattcagtccaaatagccaatgagaatgacaacctagcaccaaaagatacagtggaatcttcagaaattgccagacattgttactggacatcacttgagagttttgcatatataaagccccaatcccaagtccttggcatttctaatttagtgggatataatagaaagagttaagggctgggggtgacagcctgctatctgatccttgcatagtgggtactctcagcgttggcaggcgagatggtaacatgaggccatcggttcatatcctgccttactcccaggaccatgtatcccctgaaataaagtatgtagaaaaatcttcagccatctgtaaatgtgagtagctattgttatactgagtagtaatgttgtagacagtagttcaggccgggccttatgcacagatgctccagattgttgtggtggtttatgaagctctagggaaggccacccagggttgaagctaaaggctgcatatcttgatcagtatagattttttcctggtcccaagatagtcaaggaaatgaactgtgttgagagaatgctagtaaagtgttgggtgggcctgactcacccttttccaaatgtggggcacaggaatggcagcgagctgcaggcttatattacattgaattatagtttcatgatctctcaaaaccactttgcgggcatagtcattgatgtccatggggcaataggatcttttggaattaccagattgaaagacacaaacacatggatccatcaaggagagctgggggtgtgtttctgagcttggcatcaaggctgatggagcctccgtccagcaggaagagaccgaatggtgggtctgactctgtggaacagatgctatgtttctgcctccagaaaaagcctccagcaatccaattggttatctctgttcttttccagctccttacgtgacgtacctaaataaagacccatcagccccgtgctctctgactgatgcactggatcacttccaagtggacagcctggatgaaatcatccccaatgacctgaagaagagtgacctgcctccccagcatgctccccgcaacatcaccgtggtggccgtggaaggttgccactcatttgtcattgtggactgggacaaagccaccccaggagatgtggtcacaggtgtgtcctaagcagaaatcagagttcccatgatctgtaggtgggaaatgtggacaataaagaatggtggatgagtggatgggtgcatgcatggatgagtgggttggatgggttggatggatgaatgggatgatggatagatgtcttccttcaactggatgaaatataggcaacaatggaagcctcatggggtagggtaaggactactggatggaagtcagaagtcctaaatccgcgtcccagattgatttgcatgatcttgagctcagtacttcatctttctgggccttgatttccccatatgcaaaacatcactacatctctaacatcctataatcttgcaaatggccagggggtccagctagctccttgcaggatcagatcctgcagtgagcgtgaccataagctcccgctgggccacacatttgtccctttttggagtcagccctgggcttgtgcctctgcctctttctctcctttcacgtctgttgggtgcttccagacaaatctgggtgcttctcagttccttatgtgggaataggaggtgatgaaaaaatgcccaaggatcttgagcctccttggcctctgagatgtttaagttcactctgccaaggacatatttgaagatacatcttgaaatttaagttcttatggaaagagaattgatattttctgtgaataattgcaaattttttttctgggcctctgagctgtgtaagaggaagaagtatggctgtggctgtgtgtgtctctgactgggaggtagcggtcgcattagaggtcagagtttgacattctctgccattattgtgctagtgcagttcgcacaattcaaaatttctagtgcttgtcttggtgttcccactattatatcttacaatgaaaaaatgtgtccaagaatatccaaagagcatcttctcttgtggaatttgtacagcagcgcaaaagctagaataagggacacagaaaagaaggcttctgggtattctgccaggtgagactgaagggcgtgggatgcagggagggtttgggattaaggggttcgagtctttagtggaactaaaagtgcagtcctgggtaggtgctacacggaccgccgtgaagtctgtggtgttccaaatagaatgcaaatcaatcaatggaaggaggcaagcttgtaatcaaacatccagaaaatctttttattaattgaacacacttctgtgaatggtaatttttaaaagcaagcaagaaagcatacagaaaaataatttaaaaccttactttaagctgtttagcttttgacctcttgcataacagatattacttaacataaatatatcactgcgccctgattcaaggggcttctaagaaacattggctgcagaatgagagtgtattggccccaccaaacacgcctcaagggttcttgcagtgaagaaggagctttcagagaactcccaacaaatgtctctgagacttaatttagatgtgatttctgtattgtcctgtagaggtcgggcttctgaaacacccatgcctaggcattccaagccattcaaagctccctagagccttcatgtcctcacatgccccaccctgcacctcatctgaaacgaaacctcagagccctaatcatgagtactcacgacactagcataaataatatggatgaggtgtttataaggcactcccaatacagagccgtgccaactcctgtcaagctgattactgtggaacactgcagcacatgacaccctgtggtgtgggggaaaacaccagactccgcaaggctcagagagagaatagcggcagctcgtcatccattagtgaaccaaacaccggctctttcatctgcagaacaacgaagccaagtgaatacatcctaaacttaaatgaagcatcacattatcgggccccctgcagggcatttgaatcctgctggctacatggatgttgtgtgctctgctcattttcacctgccattctttctttcacaagcagtcaagtcaatgtgtaatgaagtggtgcccgaacagtgtgaaactcctagaattcctgcctgcaaactgttgctttcccaaatcactcctaatgaatgaagttattactttattaggagtgattctgtaggaaatcaccaacgtgatgacctcttagtttttcaggaccagctcatcagtcactttcaggactggttttgatgagaacaacagagagatcaggagttatgatgtgcccagcaagcaccttatcaaaacccagacacaggatcagccgagaaaccagtgccttacatgggaaacgcagggttctgatggaagccagaggtccaagagtctaagctttgccaactccattggaagctgggtttccgtggcacacgtgtgacctccgtcccctctggggtgggccattgtgtgcagcaccagtggaagcatatgcagggcttgactgcactgtgccagacgggaaatgccgtgaggagggcagcaactcttcccaagttcaatgactctcctctagggaacagtgtggggagggctccagggtccagttcacctggcttccaggcccagcttgcccatttgttagttgtgtgacactaatcagtgatcatagggtgctaaataaaatcacgtgcacctcttaggtgcattcgatgttattgatcttttccttcttcttaacttgtgtgatctctctcaacctcttcatctccttgcaggcttgtacaacattcagtggtggaatttctcaaggcttggtcctggggcctcttttcctcttgctctgtcttctctcccctcagagtctcaaccatgcacatggttttaattcatctcagaaatgagtcattgatttatatctcaaggccaggccatcctctcctctgagccccaaatagtaaaatcagatgcaaatcgtaaaatcacttgatgtcatcactgggatgtctccagagcatctcagacttggtgtataaaaaatcagactcatcctggctaacatggtgaaactctgtctctactaaacatacaaaaaaattagctgggcgtggtggtgggtgcctgtagtcccagctactcgggaggctgaggcaggagaatggtgtgaacccgggaggtggagcttgcaatgagccgagatagtgccactgcactccagcctgggcaacagagcaagacttcgtctcaaaaaaaaaaaaaaaaaaaaaaatcagactcatgatccttcccatccttcccattcccaaatctggcccttgtctgtgtttcccatttcagagaactgtcccactttccacacatttgctcaagcctgaagccttagaagcatcttcaagtctccttctatctcacttctatattcaactcatcattaaatctggtcaatgttgctgtctggattcctcttgaacccatctatttctctccattagatgctgtgctcatctaagctattgccatctctcacctggttactgtaagagctgtataactagactgtcccatccacatctccactcccacacccaatccattcggcattctgcacaggagagatgtgttgaatatgcagacctaattgtataggtttaatgtcttaactgtctttccctttcttttaggatgaaaagcaaaagcctagcttggcccaagggtgctgcctagttttcccatctgtgctgcttcaacttcagctcatgccacccattcctgccacttatggtttccagccacactgccttctcccgggtcctccctcttcagtgtcttgcccaggattcccactacctggaatccatcccacctcctaccacacagcttatctgcttcttatccttcagatgtcaactccttttctgtgaccccagagaagctctttgtgtcctccatggtgggccagctcccgctacacaccctctcacagcatcgtggactggtcctgcagagcactcaactcagctgtgtcattctgtttcccagtgcaccctgcggcttcatgagcttctggtcactactttatctccagcacttagtataatgtctggcaaatagtagttgcacaacaaatatttgtttaatgaatcaatacttgtgaacttagacaagatatttaacctattgctaatactcagtttcctcatgtgtcaaaatgaggaaggcaatacctacatactaggatcatgaggattaatcaaagtcaaattcaattgagagtacctagctggcataatgtttggctcaaaggaagtgcttgacaaatgttttctccttctgtgtacacataaaagacctaggatatgggatgcgctgagctgtgggatgaactttactttgcctcctgggacagttgtaaaggctgggcaggtgtcagggccaagggttcacccgctgaggtctgttattagcaaataagagagagcaggttggacaatagaaagaagagctgcctcactgctgtgattagacagtgagggcaagggcagcacagatactcagcaatgagaaatcgcaggacagccttcaccaagtgggcatgggacccctgggcgtgtggggtctctcagccccgcacacatgcacagcatccaccaacaacattcttcgtttcctgtgcagggcaatggtgtactatcttacccggaagttcttaaatacatgtgtggagggcactgcttttttcttctacttttgtttttctctgtgtgatcaagatgagacgtgattagttctgaggcgatggggaaggctggggaatgagcaagagaagtagggggccagcaggcatcaggaagtgtcttagttttgtcatccccatctggattcagcagaaggtaccagtgttacatcccatcctgtcccacagtgccgcgtgccctccttcctgtagttcccacatggagctgcatctgcagctttgcctcacacctgtcctcagtgggttacatcttgtgtgtgacttggttccttggtgtccattgggtttttcctgtttccattttcaggttacttggtttacagtgcatcctatgaagacttcatcaggaacaagtggtccactcaagcttcatcagtaactcacttgcccattgagaacctaaagcccaacacgaggtacgatgtgtcagtcatttagaaaagatgagatccatgtgcatggttgctgatttgctttggttggaaatgaagggaggaatcaaaatgtttttgtgatttctttgaataccctgtttggttctaatagaatgtcaatgcatgcttaccatatgtcatataagtttcttagaagagatgactgtatgtattgtcattgttaggctactgtgcttatattttcctccctgtttacctaaacactacctgccattagggaaagaaaagttgttatctgtgttgaaagaatcggtccatttttagtcccaatatcgtggcactaggcatcatgaccttcatatgtgaaaatggagctgcaatcactaaacacttaaatgaactcgttcccaaactctgtgacatagaagttcacatcattcaagaaagatgcattttacacatttgtagaggttataagcatgtcttcgtagactaggcgtggctggccagagaatcattttggaagccagagtttattgcccttggcatgaaataggcaaaactggttcccaggagcacaaagacagtgactgttcattccccttgtatgccatctggttttggtggtaatgaccctcggaaagctcctgggtgggtgagcatgggaaagcaccaagcacttgagggtcaagagtggtgtgctggtaaactggctctctgggaaaaaacttccttggttgatagcatttgccaatttctatggtgtaaatactaccattttggccaattttaagccaccatgggcttgcagacttcctgaatacttaatgactggctctcacaagctggtacaaatgggtccagcagactgctgttgtggggagccaccatatttgcctagcaaagagctcgaagtgaggtgagggtgcacccaaggcctctcattttctacacaggccgaggaacatggaggaggttggaacaaaatggccctcattagacaggcatgtggtaaagggtgtagaatctggacactagctgtgggcaccgaaaggctactgaatgagctgtgaattttcctcaagacattttaatgtgccatttgggcccgcttgagctgagctttcataaattgttatgaattttgggatttggcaaattaaaagcaagtagtaaaccaggaaactgagaaagcacttttttaaaactttttccctaatagtaatggcaagttatttttttaatcaattagagaaaacaaaaccaacaaaattagagaaaatggagtcaatgtcttttttttttttttttttggcgagtgcagagtgacaatgcttttgcagcacagccctagtatcaaaaagccaagaggccttccagaggccttgccacagagctacttacaacagaatctgaatcacagcctcctgactcgccgagtccagcgttctttccacaacttctgctgccagactgatgttgagttttgagtcatgtcaggagggttatgtagggcgatggtttacttgttatttcaacaggtattagagaatgtgcatggctcattcagtcagtccttactacacacttcctgagcgcaaggtggaacatctgggctgggctggggaaaatacacatggccctgccctcaaggagcttacagtctggtagaagaggcagattttttaaaaaacaacataaatataaacctcccctggtgggtgtacatctccaagtacatcatgctttgagagtatataatgggggattttttttctttatgagcttggggatagagaggggagtcatatgaggttctctgggaaagtaaaatctgaaccataagaatcagtcatcctgcagagaaggctgtgctcccagcagagaggatgtctcaaagaagtgtgtgtcctaggaaataaaggaggccgattgggaggaagggtgaggagaggcgggacagacagtgccaggggctcttgggttggccccacacacgctcagtgccttgaggcagaggaggagcagcagctgctaatcttcctctcctgaggtgcccacctgcttatgtgctcttctggtagagacgctggcagctcctcctgcatttcctcaaaacccttctgagcagctgctaaattttagagctaagaaagtacaagtgtgatgtaaggacactcattttcccctgtgtcactagaatgcagatcatatctggggaattcactttcgtcatctcagtcttcatgggggctctcttgagaagccagcttctgagtcaatacaggggagaccagaagtcagtctacccaaaagaggggccagggcataaaagtgagctttggttatttacaattggatcttgcttttgactttaagtgagcattgtctaccttagtcaccagacagagtcccaaagaactcttcggagtctgcatattttaaatccatacttaaaacacacagacttgtcatgattgaggctgttcaaaagaaggtgccagaaacttatataagaaggcgaggcatggattgcttttgttacttggctgaggcagagactattcagagtatgaaatgtatactttagcccatcaaaaaagtttcatgtaggttttaaaaatggaattttactttttgcttaatttcatattgtttttcagctcagcatatttaaatttactttgatagcttaggtgaggttttaatgggaatatgtctttggaatggtcacatgtgagtttctggaggcctagaatcattgtgtcaacagggaaggtggatttggagaatatttaggctttagtgtcaaaacaaaatcgatacaaacagatccatctgaatagtggttctcagcccgtcagtcacccttctgccacctccttgatggcatagaggcacttccctccttgacgttgactactcagcagaagtgtcccatggagcccctgagtatgcatccttccttatgttttaatttccttttcaaaaaaagtatctgtaaagtttgcccaggactggaaatgtatgccaaacccactgctcaaactgcctgcagagttttgccttaaataactccacaaccactgcataaaagtacatgtaactgggaaaacatgagctgctgagtgaattgagatttggaaactcatatgttcttaattgtgcatatctttttatttaaattacaataaaaagaatactcctaaataagatgcaaatggcttaggaagactaattttacccaatggcttttctttgctttctgtttaatcaaactcaaagtaaagtatctctgttctgaggccagagactgccttggtgatccagcagctcagaaggcttgaggccaaggctgttggtgcaataggcctaataaccctttgctctctgaataggaataattcgctttttaaaaatgtagtgcattttaattagtacatggaatttgtgtgcctgacttaatcaaataaagaattttataacatttaagtgtgacattcttactggccaaaagccagataagaggtcccttatgagctctctaaaatgacagagccaccagggattctttacctctctcttcatctgtaagtagctaagcactaaaaaagcacataaaatatctagaatcaagaggtgaggaaagcacaaagattaagatatagtggaacacaaatgtggtgttggtctttattacttctctaaccaccattctttttcttttgcttgtaagaatgcaaataacatgcttcgagactcagtctctctccagatgagctagttgactcaggcatcatgctttccagcacattctctgttccaagacaaaatttagccctacagaaaagcctctctctccggatctttcccccttccccttcttggacttgtttctctttccttgaggcgcagaagctcgtaactcagtgacttttaaggtggtcccttcccagctccagagccaaccacagtgtttctcaatgcacccaatataccattgtcatgttagcttcactgaaaaggcagcctccagccaggttcatcctctccctgtcaaccataagttgcgtggctgctggagcaaacgtcctgctcttttgcatggactccagggatataattaggttataatttgaattctgctttgtagtgttttgctccaccaccctctctctcttgggctgtgggactgaagcggagtccagagtcttaaacctgagcaagagcagggctagaggaacgtctcaccagggatgagctcaggcgagtctgcgcagagcagggacagtcctgatgcaaaggaacgcgtgctcagcaagcaacctgtgttctaatatgtcccttctactgccattagccatgtgtccctgctatgttaattgtattatttagagaatttattcaaaactgagaaagttcagaaaaagacatgaagaatcactagtgctgtatgcatttgtaaaaagtagaactcaaagcctgtcacggttcaggtgttcagtagtttgggagtctgttttgttacacagaaatcaaatacatgtctctttcaaaatatatcttcttccaacttcaggtattattttaaagtgcaagcacaaaatcctcatggctacggacctatcagcccttcggtctcatttgtcaccgaatcaggtatgaatgacttcacattctgatttgttttacttttcgagaaaatgaaataaataatctagcatgatggctacaatagaataaatccttacttttctatttaatgagctcatgttggatatcagtttctaaagtaaacatcatttgctttgtgctaggttaaaacttggataataaaattaaaagtagttttcacgggctctctgaagaacagaaaggtcaaattccaatgaaaggaaaaaatctagatttcaacaacatgagaaagataaagttgactctatctgtacaaaatttagttgcagagttttaaaaaaattattgcaagcacctgaagaacacacatgtcatgtggctgacaggaagttgcctttccaatgagccaagacattggattccccctttagtagaaggcagatatatctttaattaatattgagaggttaattacagtatcattcagtcttataagcagtatcattcagagcatgcccttgcattttggggtgctggtgggcagagctctcagtcccttcaagaaaatgttcctggtcaggggtggtggctcatgcctgtaatcccaacactttgggaagccaaggtgggatgatctcttgagaccaggagttcaagaccagcttgagcaacacagggaggtcctgtttctacaaaaaaaaaattttttttaattagccaggcctagtggtgcatgtctgtagtcccagctactcaggaggctgaaaagggaggatggtttgagcccagaaggttgagctgtagtgagccatgatcatgccactgccctccagcttgggtaacagagtgagaccttgtctctgaaaacatagttcctatgacctatggtctaatgtagcacatgcagagccagctactgtgacagttcttggcctagagacttttccatgtaggaagccaggctgagttcagagcaacccagctgagccagccctgcacccagcttccatttggctaggttaccttctacatgcagtctgagcccagaaaatgggtcattggaagatatttttaagtgtaatgatttaaaaatctactcagtcaaaataaatgaaaacataaaatcttttgtaagaatatgctttataccagaaatgtaggcaaaggacctcaaacatgttttcatctgtttgtttaagaaatatgtttctgttagtaattaggaaacagcaagagaaaactattatctgtggttaatttgcttaagtaagggatgtgtctgtgattatgactgcatttctaaaaacaaagtggaccttggcaactatcagaatcaatgtgaaaaaaatatttaaaaaaattcaaatccaaaaagctatcaagaaactctgatctgaaatctttctgagagtaaaagtgatatacacgtaacttctggagctgcaatctaaagttttgataaaacagctgtcttctaccttctcctccaagaaaaactcctaactcattctttatggcctccaagggatgggtgaggaaaattcaaggccccaccctaccctctgaataagaatctctccaggaaacactttcaatgagctcccagaggagcctcacacacatgaaaattggacaattaacttgctctggtcatcttcctttattccatcagtttattcaagtttctccttcattttgtgataacctgctgaaaatggctaggcgagcaacaggcaaatgataaagtcagtgaattatggcatttgccaaacataacaattggaaaattaatatagaaagtcaacgtagtgtgtgacacaggctgtgccatgagttcagggttttgtcgtctgtgctggtgtcattttgtttgtttcactccacctgccctggggtatttgggacttttttggcagactgctgaacttcagttcagagcaggggagcaaagcaagcatttgacacttatggccatggtgtttccctctattttgtggatagcagaggacatcagaacaaatggtctgtacaaagcacagcctagggagatttgggggtgatggaaacattttgcaggttgattttggcaggattccatgaactgatgcaggcgtgaacattcataggatacatatcctaaaacagcaatttactgtatgatatttttttcaaaaataaaaaaagaatggtccagatttacctagttcgtggcattttataaaaatgaacttttttggctggccacggtggctcactcctgtaatcccagcactttgggaggccgagtcaggcggatcacgaggtcatgagatcgagaccatcctggctaacacagtgaaatcctgtctgtactaaaaatacaaaaaattagccaggtgtggtggcgggcgcctgtagtcccagctactcgggagactgaggcaggagaatggcgtgaagctgggagacggagcttgcagtgagccaagattgtgccactgcactccagcctgggtgacagagcgagactccatctaaaaataaaataagataaaataaaaataaaataaaaaataaaaaattagccaggcatgatggcgcatgcctgtaatctcagctactcaggaggctgaggcaggagaatcacttgaacctaggaggtggaggttgcagtgagccgagattgtgccattgcactccagcctgggcaacaagagcaaaactccgtctcaaacaaacaaacaaacaaaaaaagaactttttctaaagcagaattccttgaaaagctagtgtcatattctcttaagtggtgttacttgggctaagatagagacaggttttacatttgttgaggtataaatggcatacagtaacctgcacctacttgaagtgtacatcttaatgtattttgagttgtgcttatacccatgaagccattgtcactgtcaagatagtgagcatatccatctgctggacagtttcctcctgctactgtgcaatgcagctttcccagggtccttgtctctctagtttataggcaaacattcatctgcttcctgtcactatagattagtttgcactttctagatttgggtatcagtagactcatacagtatgaactcctttgactggcttctctcacctagcataatcattttgagattcatccaaaacattgtgtgtatcagtagttcactctgttttactagtgagcagtatttccttgtatggctgtgctacagtttgtttacctagtcagatcacctgttgataaacacttgtgttgtttcaactttttgactattacaaacaaagatgctataaacatttatgtggaagtgtttggatggacatatgtttccatttctcttggataaatgactgagtggaatggatggattttgtagtaggtgtacgctcacctttttaagaaaccaccacactattttctaaaggtagacaatttttttaaatgagtactgaattattttgtaatacataataccaaaaccttactattttcagggatccacagcttctaggtaaatagcaacacactctaactagaaaacagtatttctcaaaaggaaatgtttagaaaataaaaccaaggaaaacgttggcatctatcaaaccttatctttttctttattctaatttggttagctatttcagttacactaaccatttaaagaattgcatgattgtgaaatatggcacagagtccattatttctttttcattctacagataatcctctgcttgttgtgaggcccccaggtaagtttatgttcttgataatctggacattctggtaatcaagttgaatattgaatatgagattgttgtgattactcacaattagaaagtctggaccattttcacaattttctgtcaacttctatgctttccttgcactcgtcatcctgatcttctttactctgtgggaaagaatgacctgggaattttaaaatagagccatagcaatcaacatctatgaaaaaacactatggagtagccagtcctatgaaacagatactttattttcatgaccatttgaatattttaaatcactgaaaaggtagcaaagtgcaacaagtaaaacagcaagttttacgttgtttttcaaggaaattgagaaaaccttgttgcttgactgcaaatcaggtcttctgagtggcaagaagtggagtctatgcagagggacctggggacaggatggcatgccccaaaagaccaaatctgccattacagcttattttccttgccgtttaaagacttcttaactctgagaatcccttattgaaatgtgtatactttaaatacgttcaggtaaatggaacggcccaaatgtactttagtactaaaaaacacaaagaaagagaaggagggcgggaaaactttgctcaaaaaagccctgcaaggccgggcgcggtggctcattcctgtaatcctagcactttgggaggccaaggtgggcggattgcgaggtcaggagtttgagaccagcctgaccaatgtggtgaaaccccgtctctactaaaaatacaaaaattagccgggtgtggtggcgtgcacctgtaatcccagctattcaggaggctgcggcaggataatcccttgaacccgggaggtggaggttgcagtgagccgagatcgtgccactgcactccagcctgggtgacagagcgagactccatcaaaaacaaacaaacaaacaacaacacaaacaaacaaacaaacaaaaagccctgtaaggaaaggaaggcccaggaagtcagtgcaatttcctggcactttgtgtgagaagacacactgtggagtgcttacccttagcaggtgtgttttgtgttgtcaaggcggtgagcctatctggatcccattcgctttcaaacatgatcccagctacacggactgccatggacggcaatatgtgaagcgcacgtggtatcgaaagttcgtgggagttgttctttgtaattcactgaggtataaaatctacctcagtgacaacctgaaaggtaagtctttgtgcatggttggctatgggaggtatggaacattttgatttatcaagtacaaacttggcaccacaggtgcatcggaatgtttatgagggctggagctacgactatggctcactctgcctctaatacaaaccaattttacagattctactttgaggatactagtttttacactggcaacccaaaaatattttaaaaggtttactatgttggccgggcacagtggctcacacctgtaatcgcagcactttgggaggccgaggtgggtggattacttgagatcaggaattcaagaccagcttggccaacatggtgaaacccatctctactaaaaagaaataaaaaatgaacaaatgaaaaattcactatgtcttaggaatgacatagtgactggctatgtcattccaaaattctattagaaatctagggttttttttttttttttttgccactaatacaataataatgagtacgagcgtgagctggaataattgaggaaaagtttcctctccagcccctgacacagccacaactttacagagaaaaaatgtaaatggtggaacatatatcagcagtaatatttgttctgtgtcctaataaaaatcacattgtttttatcatggtgggagattaaaacaaagaataattcgagtgctttgagctgctaacacttcctaatgcgatttctattcagctggcttttcactgacccaccgacacagcaaatttgttttttatttttaaacttgcacaactctaaatttttcagtgtatacattgttaaaactttacctcagctggtctacattttgttgttggtcaaaaatatattttgggcattttttgttgtttttctttttcttgttagtagtgatcatttaaaaactatcaaaacaaagtccctccttcgaccccaaccctagcaatttctgtgtatatgcttctcccaacaagtacggtctgtctctctctctctctctgctcttttctttctcttccatcactgtccttttcctcccctgcttcagaattcctaggagaggctgcataaccatgtgtcatatcccagaattgggagaaacaagtttgtcctactgtgcagccatggctcaggaccatggacagcgtctcatgccacaggcccgccccctcctagttacacatgaaaatagattcttctatttgtatagaccttcctgcctttcatagtaacttcatgatgtattctccaactatcatagttttcatcattccttttttttttagaactaaggaatagaaaagtctactcgaaactgcctatagtgttaatgctgtaattccaacttactggacattcattaagtatttagcatactttgatcttgctgaattcttacaacctttatgagattggtgccattatcaccattttcagacatgaaaaatacagcacacacagtttaagtaatatgctgaattcaaacagtctccaaagcttgtgcaaaaaaactcctaaaccagttgtgactttctgtacctagtcatggactcaatcaattccttcatgcagatacattctacagcattggagacagctggggaagaggtgaagaccattgccaatttgtggattcacaccttgatggaagaacagggcctcagtcctatgtagaagccctccctactattcaaggtaatacaaacaaatgcctgatatattatcctaggaggtgggagacaaggattaatagagggggaaaatccacagtaggtctgcctttgccttgtcattcgaagatggatgttgggagcacttaaggtcataaaaataaataaaataaagaatcaacaaaatacttctattatgcatgggtgagggggtgagtctcaaggaggtggggaacggcatgaacaaaggtacagagaaggcaaagataaacacacatgcagacccaccgtgatatgtttcaggaggtaacgtataagctatttgattgtggcattataaggtgaagacaaaatacactaatctcaaaggttaacaattaatgttactaactctctcggcctccaaatgaataaacagaacaactgagtacagtctagcacccttttgattatgcactcagctctgagtgatcaggtattttccagacatgagatgttctgatttgctaaatttttagattcgaaaaaatgctgtaggtagctacatgaattacccattttcaaaaaataaaatacagtaaaatacagaaaagagtaaaataagcatattagtcaaggttctctcatccaaagaaacaatcaataggatctctctctctatctatccacccatccatctatccgtctctctctctctatcatctatctatatctatctactcaactacctatctatccatctatgtatgtatgtatgtatccatccatctctctatccatctatctatccatccatccatctatctatccatttatgcatccatctatctatctatctatcatccatccatgtatctattattaatctatctacacatctacttatgtatgtgtgtatctatctattcatctatctattcatctatctatctatctatctatctatctatctatctatctatccatactgtctatccttatatttataactatctatccatccatctgttcatctgcttgtctatctctgtatccatcatctatctatccatacttcaatctatctatccacctatccatgtatctatttatccatccatccatccatccatccatccatccatccatccacccacctctaggtatctatctatctgtctatctatctatctatctatctatctatctatctatctatccatttgtttatctaggtatccatccatctgtccatccatctatctatccatctgtctatgtatgtatgtatgtatgtatgtatccatccattatctacctattcatatctatctatctatctatctatctatctatctatctatctatccatctatcatctatctatctatctatctatctatctatctatccatccatccatctatcctatctatttatctaactatctatctatctatctatccatttgtttatctaggtatccatccatctgcccatccatatatctatccatctgtctatgtatgtatgtatgtatgtatgtaggtatccatccattatctacctattcacatctatctatctatctatctatctatctatctatctatctatctatccatccatccatgcatccatccatccatccatccatccatccatccatccatccatccatccatccatctatcctatctgtctgtctgtctgtctgtctatctatctatctatctatctatctatctatctatctatctatctatctatcttattattttaaagaaccgtctcacacaattgtggaaactgaagtccaaaatctgcagggtaggttgtcaggttggagatccagggaagagctgatgttgcagttcaaatccaaaggccacttgcaggcagagttacctctggttaggggaacctcagtctttttctattcaggcctttgaatgattggacaaggcccacccacaatatggagggtcacctgctctagtcagtctggtgatttagatgttaatcttggccaggcactgtggctcacacctgtaatcccagcaccttgggaggctgatgtgggaggattgcttgagcccaggagtttgagaccagcctaggcaacatagtgagaccccatctctacaaaaagtaaaaaaattatccaggtgtggtggtgcatgcctgtagtcccagctacccaggaggctgagatgggaggactgcttgagctggtgaggtctaggctgcagtgacctagaggtgacctagtgatctagaggtctaggctgccttttggttaaagagccatttggtctgtcctgcaagtctgtcttggttttgtggccccactgcaagaggacaacagactgggtaacatagcaagatcttatctccaaaataaagaaaagaaatacaataataaatggtaatctcatctaagaaatagtttacaaaaacatttaatgttggatcagatatatagcctagtccagttgacacataaaattaactattacaacaaatctacaaactatatcacctttcttcatttttttctgggtcttacagtccctcagggttactagtgcctgcattatccatattccatggtgtccctgtgactgtggtcatgggactggccctgaacagagctgctgggtattcagcacactcactggtggaagggcaggcagctatttatttggcaaaagtaaacagggccaagagtgtgagagcagttattgagtttccagaaaaatttttagaaggttggagcatccctcctacttcaagggagaaatggtcagaaatgctacaggttttttttgagagatttccttgaaaggtctaaaaatctaccccagagtccaggaattaagccttggaggatagaggtaagttgggggccctgagctctgtaagaatggggcaggaatctggctcaatgtcatccatccaggtcagggcctgcccagtagtgagtgctgactagcaactggctaaaattatcttcttccatggggagagagagatcatgccatcctagctgtgtcacacatgtgtggggactggacgatctctacagatctgtttgggataaagaaatactttacacttagtcactgggttcctatggaggaggcctgagctggtccccagctccagcatggcccctgagttacagctgggctttcccaaaaggcataagagacaggtggggaagaccccaccccaggctggggttggggctgggcccgaggtcctggcccttccccagggctatggcaaccacacacaaaaatggttcagtttatttgaaagtagcgttttgtcacaagaacaacttatcagaggccttctgtctgaaggaggctgtaaggatgagttctacctgttggttcaggggcctctgacgcttttcccctctcctgttgcccttccaggctactatcgccagtatcgtcaggagcctgtcaggtttgggaacatcggcttcggaaccccctactactatgtgggctggtacgagtgtggggtctccatccctggaaagtggtaatcacaggaccgtcatgctgcaagcttgccctgcccagccccaccaactaagtcgcactaggggctgtgagcaaagacagccagcgtgctcagccccgctgccctaggtgccaggaaggtcatagatggacactggccattctggtcatctcagtctggaactcagtcccacttcttggcctggacaatgaacaggattcagttttgctgttaactttgcttctctacttttttttgtttgtttgtaatagcacatcccagagacatcagaaaccagcaactgattcagtgtgatttccagactttttaggcatgaaattcggacacttcagtatttccaggaatagcatatgcacgctgttcttgcttcatggaatgctacatgctttctgtttttctcattttggatttctccaaaactaactgaatttaagcttcaggtccctttgtatgcagtagaaaggaattattaaaaacaccaccaaagaaaataaatatatcctacttgaaatttactctatggacttacccactgctagaataaatgtatcaaatcttatttgtaaattctcaattttgatatatatatgtatatatgcatatacatatccacacttgtctgcaagaatattgattaaaattgctaaatttgtacttgttcaccagat

SEQ ID NO: 7 - DNA, 119755 bp, Homo sapiens
ctgattttcagatttttaaatcatttttatttgtgcacggctttactttcttttcaccattctctggatatgatagctaaaactggactctactccctggatgtgggtagactatgtaaggtctactgtctcctcactatatttaggtacatatctgtcattatgattttccagtctgacatgtaaagagcttggaagtcatcactcatcttctcacaaaaagacaaaaactgaacaaactgaaaatcaacaactcttcttagaggcatcagataattgagagcagaccgctgctgcaaacactggagagagagtcagatactaagaatcatagtttacaggagctgaagctgaggagcagaagccagaggctggagccggtgctggtaagaacatttaaactataattgacaaattgctataggctcaatgtggataaacttgagagttacaaactctgggggcccagctctgggagggcccacatgttttttgttttacctccaagagcaccaccatgttcttttggtgaagattggagaaaaaaatcccagtctttctggcagggagagtaaccatttttaaatacacccaaagctctctgttctccttaataaaagcctgccctcaaaggagattgttttgccagagcctaatctacggaaagggaaatacccaactccagccccctttagccttcccttctcacctaagggatgaggaaaagctgagaagcacttgtgaaagtcacagtgcagggcacagcctcactataaaactaagacttcattataaaattacagaatggttctcttcttccatgctttaccaccacatcagtaggtctcctgtataataatgatggattatgagaagaactgcagggctcagaagatatttatggagtctctagggaaacacaaagacaagtgaaacaaaaaccaagacactgaaaaataattccagcctcagacacctacagctacagcaaacattaaacatgacctagctcttagacagataaaactgtaattctaatattgcattgaacgtgtgtggtcactcccattttgacttaaagaggcagtttttgacactgttgttggagtttgtttttgttgttgtttcttttttatcagtggtgctagtaagtcacatcctacattttatacatttcatcttacttttggctctgcttattggatatttatgcttgttaatgatcagtcacattttaaggtttcttggctctaccttgacattgtctattccatggacatctgtcattgtccattccagttttacattgtctgaattagatgaacatattaactttattaggcttttagatctgttaagttctaggagctcctctctaagctgaatcaagccgattaacagccctcctgcttactcatctccagttatctttggtcatgatggtaagaatttccataagagagactttctcaagcttccttgttaaaaagcttgctgaagttcagatatattgggacagtgtaagtagaatatacaattagcaaattccaatacagaaagcgatatgagtttagtgtgacaaatacaaactgatttcaacatttggcaacttcaagttctccctaatcgggttgttgttttcattttcaacgataagtaagaataaagccatactgggtctttgtgatagatgagaaaattataaagaattttagaagacaggattctaagaaaaatatatgtctaaaaatatcggtaaaataacacatataggctttggaagaattatgtctatttttatcaggagagaatcaacatatatgtagcttacagatgctccagggtctgggttctgagaggggctaccatgattgttagtataacagctttgctgcatccagctgccatttagactttcagaaatggacttagcccctgttaattttccatatctgtgaaatgtggatagtaatagttcctacctcaaggattgctgtgatgatgactactggaatatagcaagtgaacagtagatgttacttctaccagttttcacagaaacagggatgtcatggtatggaccatatttctggaagataagtaaaaattggtgcggatgacaggcaagtagcatggttaaagaagaatagtaagaatactagcattagcataagaatactcatactaataccaaaaggtatcaggatctaattgcagctggacaacaaacttcaacaacttgggctaaattgtcttgattatatatctttccaagagcacgcaactgaatggagatgagacttggcatggtagggtgggcagtggtgagggtccataacaggaaattccaaggaaacttcccaggaggaaatgaaaagttgtttcattcttcccattttattacacagcattgcatttcaggacacctcaaaattctattgtgaaaagaaatgacaactttctctagagacaacccaaagtagattaaaaacccatctccactaaaaatacaaaaaaattaggtgggtgtggtggtgcgcgcctgcagtcccagtccaagggggctgaggcaggagaattgcttgaacctaggtggggggaggttgcagtgagctaagatcatgccactgcactccagcctgggcaacagagcaagacctatctcaaaattataaaacaaaaacaaaacaaaacaaaacaacaaaccaaaaaaacaagtggaaacacacacacacatgcacacacacacacacacacacacacacaaaccaaaaaaaaagaatggcatctctctaggaagaaaagttaactataaaccacctaataagaaaagttgtccagtcagtggccttagctatccaagactctaggtcatcactcagccagggcccttggagtaaacaagtaaacatgaggtgataggcccatgggcctatctaatttgttttaggatcaagaacccaataatgctgccacttgcagctaaattgccttagttattttgttataacctgcatatcaccctttagtggatgtcttagctaaacatggatgctgacacaaaggctaagagggagcttatggggaccccgaaatttttggaagcatgatgctaatgtgatgtttttttaaaatctttcaaaaaaagcttatgtaagatcctctgtagtactaagagttatatgatattttgaaaaatatgcaatttcccatttttccttgctttttattattcatgaacttttcccaatccacctattatctatgagaatattaagtacaagaaaacagtgctcagctttgacttcaaaagcaaactccccaaaactgcctaaaagagcatacagtttaataagtgatgggtggaatgcctcagttgggagataaaggatgtgagtgtttgcctggaggcctgtgaggaatcttctggacttagaagagaagaacagaattagtattcagagtctgcacagcctttgctctgtcagctctatgcagcactaaggaaccttttgtgagccaagccaatgatgcccatgggccatcaatgccctccaggtgagctcccactgcaggtgtctgcattgcccattgattgtgcaagaggagagttccctgctgcgctgacggtcaacttgtctaaattacctcagtaagcaaccaacccgtatgcccaggatacttccaagccccccaaatagagaatggttttaagatactcaaggaagcagtggaaatatggaaagttttgggtggtattgtttagatccatctcaaaaacccttcacctgccccaccaccagcccccagaagagggaagcctttggccctgatgaaggaatcataatacaaccatgaaagagcacagactttcttttatcctgctagtgtctgttttccaaccattctgctgtgaatttactctaaaaaaaatagctactggaattggagtggacatgagtggcagaatatttaatatcagagaggacatataacttggtagaagcacattatttaatatttaaaagtacacatcttgaagccaggatcgtcgtattcttaggtttccggctttgagtgaactactcatatgagcctgtgttttctcatttgtgaaaggaaaataatgctgtcctcagccttataagacctaaatgggatgttacacccacacacccatacatagagccacacagtagacctggtcacatcatgctcatctgttgtcaacacgctcatctgaatttgttgagcacatattatcttcagctgctgtgaattgcctgtaatggagataaaattctaagataccagcaagcacagggatgccttagtgttcctggatccccagtattcacatgcctgaggtgtgctttccctcgcaggaggagtgcactaaggagaaggtgctaatggactactgatttcttatccattctgtgctattttaagagtgtgcacaaaatattctatggccctggatatctatttggaactccagccaataactctatcaccttggtctcaagttttgagtgagttgggaaatgagagattttgtacaaaatattttattttatgaagatctgcttttgaatatgttattctatgtgtaataggtacatagtatatcagaaggtagaaatgacaaataccctgttttgtctttgagaatcttacaatgcagtgggagaaacttatttggtactttccaaacatgcaaaataaccataaggcaaggagatttagatttttttttcagtgttcagttcttctggacacacatcctaaatcaaaactgtcatttttaaaaagacacaacttacaaatgtcctttcctgagtacgttttcaatgagattgcaataaaaggttaaaaaaaatgtataaagaagagtagactattcagggcagaagaaacagatctcaggcctctacctataactcattcatcacatggttggtcaaaaccacagctttgagggaagaggcaaagaggaagaacactctaattttaccagagctaaaatcataaaagtgtcttcctctgagggaaaagagagaggatagggaagagagagagagagagagagagagaaaggaaggaaggaaggaagggggaaaggctggcattattttacttgctaatttgtaagtgcaattaaggttaaagtcatacttcccttcacaagaaaacatgacccaaagctgaatgagcaaagaaagctttgtttgtaaagaacttttcaagacgctgtttttctcctggaaaatgtggtttatctaattgatggctgaggaaaaccatctttttaaacttcccactcagtgagtcactctggggtgtgtctgccttgtagcatcctgtgagatccagtaatctaaattggcatgacccaggcagccccaacctcatgcgtcaagccgagctaccagcgctgggaaaccagagagagcccggttttctaaacagagtggttaacaaaattgcatgttatgaaatggggtttcatcctttaaaggatcattacctatttttaaaaagaacctgtcgaataattcctatcacccccagatgtctacagttgccaggtcattaccccaatggaagggcaagtattatttccttagggtttcttcatgtttaccttgaagataatttctatgctgccaacagttgcattgaatggaggtgaaatggagaatttggacatgttcttcaaacttaacttgagacgccgacaaagcattatgaattctgaaccagacagccaatgggacatcaaaatctggggaaataaatgcaaaactagtctgaaagtcttagccattagtacagagtcttgtccggtacagcaactcaaccatttttgacagctaaaaatttttaatcaccagagtgttgtagctgatgtgtatgaaagtgcaatgtgcatggtggaccttaggaaagaacaaaataaggggattaagttttccgaaagaagagatgtatgtgcacagatggcttaggggagttattggtggagggtgtccaggttcttggctttttgaagaaagaattggacaaaacacacaaacaaagcaaggaaataataaagcaacaaaagcagagatttgttgaaaatgaaaccacactccacagggtggtagcaggccagaacaaccagctcaaggacccagttaaagaattttctggtgtttaaataccctctagaggattcctattggttacttgatgtacaccataggtaaatgaagaggataaagtaaggttacaaatttatttacttggtgtacaccctatgcaaatgaagagaatgaagtgaggttacaatgttatgtacttggtgtacaccctatgcaatgaagaggatgtttcctgccatagctgaagtagagttacaaagttatttacctgggcttagaaagtttaatttaattccatttaaattagttccaggaagtcattaggttccctgcctccagaccctgtttcctgcttcaggggtttctggaggagaacagagaagataaggggttagaaataatgtcaagccatcctttctgaaaaaaatagtctaccttcttcattatctttattatctgggtatcatatgagaatgtggaaagatagtactttggattctttgaaatttatttagccaaacttccagggttaattatttggaataagatgtagaggctgcaaagtgagccaacaaaatttaagtgttaccttggactggaaagcctttactccaatcctcagggattaatgaatgaggtaaggaacggtcttggagagaataaattgaacaccagataagttatacaagataagttataccagatagtttaagttttaatcgaggtgcttaagtctgtatgggatgttcttttggggagatggcaatgtataagggctgtctttaacttctctcacctctcccacatgattagcactaagaagaaaatgtagtagacattgggtaacaaagttagagaaggaaatgagttgaaaaaatagcgttgctatgttagataaaagaggtgtgacaagaaaagttctcaatgttggaatgagataaataatatgatcacaacctgagaactctaggaaccttattataacatgcaaatgatgagcctctatccacttcaggcagcattttcagcacatttgggtgtttaaagcaatcaccacattagagacctagaaggattctccagagatttaggcttgagaaaacatatgttttttggttttttggtgttttcctgacttctcattagcaacagtgtaattttcactgctcttccatccaataaacatcacaattatatccccagatcacaatgatcagctctggggaccgatgtggaaactcatggtcaccatgagagactgtgaagtcatagttggctgctggaaatgaagacagaggactggcaaagtactctattgtgactacagatagaagtcctttaggattgtgaatgtctaatgagtcctttatactggcttttgaacctcctccttaatatttccaaaaagcattacttcagattatctgtttttctctgaaagcatgacatacatactactggtagtaggcaagatggttttatgtggtacatgatcacattaaaaataagataatgatgagtttagatagagaattcagatagggagatagtaggtgaataacaataccaatggtactatggatatgacaagaatcacacaatttttgtgtgaatggctgaaatctgtcctgttctatactttttgttaggtgtgtctcatagttgtatagatggcaatttctagactcaaaattatgaactcctaagcaactggaaaatgagcaaagctggaaatttgaacttgatcatacaagccttccctgcagactgacagaattaaatttcttatggagaaccacaagtccttaataattaatcacatatcatgagcttcttattagacagggagagtgggttgggggaatgtctacttttgtaaactgagctggacaaacttcataaatcggtgagggtagattttattcagtttcaagtttaattttattatccctggattattgttgattttgtttaaaagtgtgttgtactagcagaattgcatttgcacatgtgtttccaacccacttggatatgaccacatgtgtttcaatggaatcattcagatacaagagtaaagttaatcaatcagcaaacacagatcaaagtccatcttgcccatttcccaaaaatgagaaatgttttcagcaatttcaagcctgatgaaatgaaattggatgggggaaaaggagacaaagatagaataatttattctaccaacatatgccatgagagaaaaaatataatttctatcaagtagttagggagttaccaagttgtccactgacttagacacaagcactttcctcactagaactgccctaccactctctctcatcccaatccagttagaacttgtttagtgagaaggtacctccctgaaaattgttgatgtattgatgatgactgtggtgtggctggtgcaagttcactgatctcagatagtccctataagtaggttttaagtagggatgagagacaggaagagctgagtagctgaagcattagaaaacagagcacaactttcctcatgtcagccaccagatctcatcatgatggtcttggattatattgtgatgtttctcagactgtagagaagcgaaaaattacattgctgctattgagtagtcagaaaaaacactgaagaatcaaggaaacttagttttctcagattcaaatctctggaggtttctccattctaggtgaggatcatcctaaccatgctaaaagatagaatgatgaaacacacagagagtatcagagcgaggttgtgaaacagaaagatatatagactcttagctgtgtctgaaagactgtcagatagtaggggttgagctacaaggtttgaaaaacctgttgctcagttgtagacatgaagaggagattcacgttgactttggtttacctttcacatgtaaaaagcttggaagtcaccactcccatcctaaaaacaagaaataaatctgagaagacttaaaaaatcaatgacatttattagaatcaccagagacttgagctcacaagacagaccaccacctcgaaatctgaagagacagatgaatacaagtaactgcagctgaaacttttgtaccagaaacgaaagctcttgaagatgtatactgataagatggttaaatgtgaattttaataaattctttgaggttgagtgtagattagcttgagagtaaaaatcctgctaggccagtcttagttttccccacactttgatgagttttaacttcaggatccccagtggtttctcacaatgaaacctggagaagaagaaacatcaggtgatcatactaattgtttcacaaaaagcatttgacaaaaatccaatacccgttcatggtttaaaaaaataaaaacctctcatcaaactaagaacagagggaaactttcttaacctgttaaagaacatctatgaaaaacctacagctaacatcatacctaatggagagaaaaacagatgttttcctcccagttggaaagaaagcaaagatattctcccttaccacttctagtcaatattgtactgcaagtcctaggtagtgtgacaagatttgtaaaaagaaaacaaaagatataaatattaagaaggaagaagcaaaactgtctttccacagataataaagttaaaaaataaataaagtaaaaataaatgaaactgtaaaaataaaatagaaaattaaaaagtaacaaaaaaagtagaaaatgaaacaaaaaatagaaaaaaaaatcttggaactaatagcagattatggcaaggttgcaggatacaaattaatagataacagtccattgttttcctatataccaccaatggaaatgttggaattttcaaagaaaaacacaataccatttataatagcatgaaaataaaacacttacatagacatttaagaaaatatgtacagaatatctatgcagaaaactgtaacactgtaattaaagaaatcaaagaagatctaaatatataaaaagatattccatgttcatggattggaagactcaactttttttttcctctgagatggagtctcactctgttgccaggattgagtactgtggtgtgatttcggctcactgcaacctccaactccctggttcaagcgattctcccacctcagcctcccaagtagctgagatcacagccatgtgccaccatgcccagctaatctttttatttttagtagagaaggggtttcaccatgtaggccaggatggtcttgatctcctgacctcgtgatctgcccacctcggcctcccaaagtgctgggattacaggcgtaagccaccacgcccggctggaagactcaatatttttaaggtgtccattcttctcaacttagtctagatattcaatgcaattataatcaatattccagcaagctattttgtggatattgaaaatctaattctaaagtttatatcgaacagcaaaatacatggagtagtcaatgcaatactgaaaaagaacaaagtcagaggactgacagtgcccaatttcaagacttaatgtaaagctaaattaagacagcattgtaatgatgaaagaacagacattagattaatggtacagcataaagagcgcagaaatagacccatactgatatagtcaactgatttttgacaagagcaaaggcaattcaatagagaaaggatagtcttttcaacaaaagatactgaaataattcaacatccatatgcaaaaataaataaatctagacaggaattacacctttcacaaaaaaaataactaaaaatgaatccttgatctaaatataaatcataatactatataacttctagaagaaaacataggagaaaatcgaggagaccttgggtttggtgagtttttaaatgtaacacaaaaccaccatccatgggaaaaaaatagttgtctttattaaaatttaagtgttttgctctgtgagaggcaatgttaagaccatcaaaagacaaggcatgaagtagaaggaaatatatacaaaacccttatctgataaataatttgtttgtaaaacatataaacaactcttgaaactcaacaaagaaaataagcaacctaattaagaaataggcaaaaaatctgaacagaaaccttaccaaagaagacatttagaggcagacaaacgtgtgaaaagatgctcaacattatacgtcattagaaaattgcaaattaaacaataatgaaataccactacacacccattagaatggctaaaataaaaacaaaaaactggcactaccagctactggcaaagatggagagcaaaaggaactctcattcattgctattagaaatgtaaaataacattgaaacctcagaagacagtttagcagtttctgacaatgctaaagacaatgttacaatccagtcccacaattacgctcctaggtaattaaacaattgagttaaaaacttttgtctgtacaaaaccctgcatgcttatgtttatagcagccttattcataatcaccaaaaacttcaacaggtgaatgaataaacaaactatggcatatccatacaatgaaatactattcagaagttaaaaagtaagctatcaagccacacacacacacacacacacacaaaatatatatatgtataaaccttaaatgtagccaggcatggtggtgcgcacctataatcccagctcctgtggaggttgaggcacgagaatggcttaaacttgggaggtagaagttgcagtgagcctaattgcaccactgcacttcagcctgggcgatagagtgagaccctgtctcaaaacaacaacaacaacaaccaaaagaaacaacaagaacaacaacagcaacaacaaaaccccaaacaacaacaataaaaaatcttaaatgcatactgctaagtgaaagaagccagtcctaaaagattgcatactctgggggttcctccccagcctgtgcacctcccatctctgaaaaagaagccccagagccccaccttttccccacccctccagggcttgtctgtggacggtgacagggtttgaggagtggtggggaccgctgaggcaggtgtcagagggcagtctggtggttcttattctaggaatgagtcggggctggatggcagtggctgcacctgtggccagtcagctgctgctgtccataccacagccctctccctcatgatgggaagggaatggtcaggctggctgctgccattttgtccctaaaaaaaagaaaagaaggaaaaatgaaaaggctgtgtatattgtatgatccaattacagggcattctggaaaaggcaaaactatagaggcagtaaaatgaccagtagttgccagaggttccaggataggatgaagcacagatgatttgggggaattttatgtatgatattacaatggtggacataaaaccttatatatttttcaaaatccatagaactttataacccaaagagtgaacactaatatctgcaatattttaaaaacaatttaggaccttggggatctcagaaaggaatacagactgtgacgagagcatctaactgtaatgcaaatgatgaaacaacttccctgcaggggacggagggaagacgtgctgacctaaacgagtagaaataagtggaatctaaggctaaaggcaaaagaaactgcacataaaagttatataagtggtagctaaacaataagaacacatggacacatagaggggaacaacagacaccggggcctgcttaagggtgaagagtgggaagagggagagaatcagaaaaattacgtatcagttactacgcttattacctgagtgatgaaacaatctgtatgcccagccccaatgacacacagtttgcctgtataacaaacctgcttatatactcctgaacctaaaagatttttttttttaaatgaagaagtaaaaaggctctacaagacagttaatcacttcacttgtaggaaaagtcacagtattcaatattttatggcaactgagaagaatgcaggataggtatttttgtgctcactagagaaatagaaatcttttgaaatgttcacacatcgtttttttgcattctatttgatagattaaattcatatataattttttaaaaatgttttcaaggttgaggggacagagttgaccacaacccaatgttagacagctaatatcctgggctttcccattgttcacattttggaaattcctgttgcctagttactgtttttcattccctgtatctttcttggtctttgttcattcaccagtcttagtgcattttattgtccagtcactttctaataaaaactgcataaaaggcaaatgttccaaaatatgcatgtctctaaatattattactctacactcacccttgtttggtccaatggctgtgtatagaattcaaagttggagacgattagttgttaaaattttgcaaacattcattccttgttttcttatttccaaacttgctgtaaaggagttcaaagcctatttcctttgtatttgacctcttttatctcactagaagatttagggatatatttaatccattactggttgtggagtcatattttaattatcataacagacagttggtgagccttttaacctgcaaagtcatgtcattcaattatgggaaaatgtataattgctttgataatttgatctccatgtctcttttgtccattttttcttctgtaactctcatttttcagatgttggacttcatgggttgctctcataatcttaagtttcttctattttcattcattttttttttaattgtgcatgctgagatgttttctcagcttcatcttccaatcttctacgtatagaaaagaatgcacaaatatatatatagccaactagtatgcataaattaatgtatatgagtgtatgtatatatgtaaaattttcttcctcgctgtattcactttctctcccttaatctgtttctccctttctctgttttctcttctttctcttcctctttcttcactctctttgatttatccttcttcttttggtttttcttactctaattccatgactctttctcttttaaatttttaaaaaattgacaaatcacagctgtatacattcatgtaatatgtgtacaaggtggaatgataaaatgaagttaacatattcatcatctcacttaactctttgtgttgagatgtttgaaattcagcatcttgtttattttgaaatatgccatcttacttatttggagatgaataatacattgttattgactacagtcacccagctgtgcaatagatttaaaaatttatttctcctgtctgactaaaactttgtaagctttgaccaacaactcatttttctccctttttttctccccaagcctctggtagtcattattctactctctacttctatgagttatttagatttccccatatagtgtaattgtgcaatatttgtcttcttgtgcctgcttatttcacttaacataagtgaatatgtcttccaggttgatccatattgttgcaaatggcaggagttctttctttttgcaggccaaataatatttcattgtgtgtatatacctcattttctttatccatctgtcgtttggtggacacttgggttgcttccacttcttggctattgtagataattctgtattttctacaaaaatgacaagaacacacaatagggaaaggacaattttaaaaactaagttgtgctggggaaattggatatccacatgtagaggaataaaattagatcctgatctcacatcgtagaaaaaaattaactcgaaatggattagatatttaaacataatacctgaaattaaagaactgctagaagaaaacataggaggaaaactccatgacattggtctaggcaaggattttttggagatgaccctgaaagcacaggcagcaaaagcaaaaatagacaaatgagattgcatcaaacttagaaggctcttacagaaaaaaaaaaaaaaacgattaacagagaaaatattttcaaaccatacatttgatgagggactaatatccaaaatatataaagaacacaaacaacacaatagcaagaaaacaaataatccaatttaaaaatgggcaaaggacctgaacagacgtttctaaaagaaagacataaaaatgaccggtgagttcataaaaaaatgttcagcatcactaatctttagagaaatgcaaattaaacccacatgagatatcccctcacacctgttagaatggcttttataataaagatgaaagataaccgttggtgaggatgtgagtaaaggaaatccttgtacacagttggtaggaatgtaaactggtacaaccaccatggaaaatggtaccgagtttcctcagaaaaactgaacatagaacttccataggagccagcagtttcacttctgggtgtatatccacaggaattgaaatcaatatgtctaaggtatatctgcactccatgcctctctcttttaatactttatttcaatctctctctttgctttctacctggtttgacctatgtttttgcccttattcatttttctctttttgtttttttccactattttctccttttgtttccctctctctttttctctcaccactggttcccttcctcttcttgtctctaatttcctgaatccatgaaacatctcccccacatctgtttctgtctttatttctccactttacttgatatcctccctctctcctcttagctttactctcattaccactctccatgctgtcccttctctctctccatctgccccttcactctctctacacccctctgttttctccctttctctcttccttgtttcaccacatctccctgattctcatttccataattctccctctcccatctctattttcaatccactatccttattcacattttctatattgctcttggtattacatttttatttccaaaacctcttatgcatcttctgattttctcttaaatacataaagcatcaatgtcttgtttcatggattcaggattttttttttttttttttttttgagacagagtcttgctctgttgcccaggctggagtgcagtggcacaatcttggctcactgcaagctccacctcctgggttcacgccattctcctgcctcagcctcccgagtagctgggactacaggcacccaccaccatgcccagctaatttttttgtatttttagtagagacagggtttcactgcgttagccaggatggtcttgatctcctgacctcatgatctgcctgccttggcctcccaaagtgctgggattacaggcgtgaaccattgctcctggcaagattcaggatattcttacctttaaggatattattttatctgccattatctcttcatgggcatcttgttttgcctatgccctctatattaatttttcctatttcctcattggttttcagctctgtttttcatattaatgttttctgatcctacttggcagtctgtacctgctgattttttttgagttaactttttttaaattttattgttattatactttaagttttagggtacatgtgcacaacatgcaggtttgttacatgtgtatacatgtgccatgttggtgtgctgcacccattaactcgtcatttagattttttttatatttttttctttcttttgaggctgggtctcactctgtcattcaggctggagtgcagtggagaatcttggcttactgcaacctctgcttcacgggttcaagccatcctcccaccccagcctcccaagcagctgtgaccgcaggtgcagaccactatgcctggataatttttgtattttttgtagagatagggttttgctatgttgcccaggctggtctcaaactcctgagctcaggcaatccacctgccttggcttctcaaagtgctgggaatacagacatgaaccaccacacccagcctgtaactgccaatttctacttaagagctgcactaaaaaactgtttgaaagtttaatgtgcaaggatacgacttgttaattagtggttgtcactgtagggtaactgagcaggatctgacaagtattttgggaacctacaatgtggatatctatgggcatttttcttctagccagtcagaaaggaatcttcaataaaaaaatacattcttcaatcttctgtatacagtatagaaacctagataatagattctggcacctacaaagaagaggacctgcaagttttaccatttgtcatgttgactttaatttaaagctcctttttttccatgtagaaactcacttttctttcagcgctggctggggtctacaggtccaaactatctggtttattcttttcaatgaataaatatccaaccttcttctaggttaaaagatgctgttttagcctgggttctcttaaaataaaagcctgagactgaggcataaataaacaatagagggagaaaaagtaaatgttaggggaattaggcagagaagatgggagaataataaggaaggacaaaaatataaatttgatgattaataacaaaaagcactgccaatacaccaacattggagttagtgttgaagtctttaacgtttatataaaaattccagtgtttaaaatgttgcagaatataaaaatatggaagttttcttcttacttcataaagctactacaaaggacagaaaagagactgcatattaaaagaatgaaacaatgaccatgtaaagattttcctagaatacaagaatagtttaagattggaaaattaatagaatgtgtcagtcaatcaagatctccacagggttttgataaaacatccattccttttataaacttcatagtctaagaatgaagagctctttccttaataataaacattcttaagccaacattcaatataaaccttaacaataaaacattgaaggcattcccattaaagttagaaaaaagatatgaatgcaggccatgactacagcttaattttggtctggaaatttagaagaacccgtgggttctttatcactgtgaaggtgatattaaaaggtaaacatctgcaagtgccaactcctctgatcatataattactttctttctgagaggctctattttcattgaagacaattctatgacctctccagagctttctaaaagtacagaggaaaagggtgagggaatgcacaggtcatttaggaatttagcaaaaaatagtttacagagtgaaggtctttatgtgctgagactgagagccaaccacagcaattccatgatgactggataattgtaggctttacacacacattccagacactccccaggccctattacaagcacaattagaagcatccttatgtgatagaatagcattcctcattggaattgtgactagttgtggagagttgtcatgggtgcataaaaagaaagtcttagaatttttgaaggtagaaagggaaaccctagtgcctcttttgatggatttaaatataagatgtcagtcaaatggaaacaagacttgaaaaccactatgagagatgggcagatcacgagatctttgaattaagagctctggactcaagattatctatttgctgtctaatgttggataagtgaattacatgccttcttggacgagttgtcagacaggtgaacatctggctcacaaaagccccagtattaaatggaaaaaaaagtttctccagctgaaatattaattctaatatttttgagaaacatttatttgattgttttttcctttgtcaccgcaaatgtaacagagatttcaagaaactggtaggcctgagtcagagctgggactgctgaggctgcaaaatcctatggtgtaagattacaggttctgcccacctgtagaccaggttctacaaattgaggaagacagtctttggtttcagcagcaaatcaaagggcataatgctaaagattctgaacaggtgaagccagtgacaccacagatggggcccgtgctagattttgtccataagttccaataattcttaggagaataatgatgatgatgaaataactacctacatttattggtgtgctacataagaactattagttttgggattcagtcccttcaactctgaatttcatggcctgaacacttgttagattcataccctccagtgaaattggaagagtagaggcagaccacgcaacatgtaggtatgacattggtagatctcttcatagggaaaactaaaggagcacaaatcttggaaatagctccagttaagcacatcgaaaagatgttgttttaaatgagattatctccatacattagcatattaattttcattttgctatcccagcaactgtgtcaactccatttccaaactgtaaccacggtaacatgtgtttaagtacataagctgatgttcaaaatgtgaaatatgacatgtcaacctgagaaacttttttatagatcaggtttagttagtactgtcttggttgatacattgaatttttgaggctttttctgcttcagtaacaatttctatgtaatcaccattagaatctttgatcaaagtacagtgcatttagtcttttagtaatacagagcagaaaatgatcattcaacacttaactgtagagactggctagggcaaactgtatgaaattactccaagacataaagcaatttaactgtgaagatcatgtcagataagcaaactgccaacatcagttaagttggaatgtaatagataatgtggaactttgtgtagttttgttggaattataaactgggaacatatttgcaccaaatctaaaatttgtacacatattggccattacttcatttattttgttctatagctacataaatcttatttcatcttgcttaagttttaaaaagccaataaatttagtaatatagtcttcactgcttgtaaatgttattttctactgttctgataaagtaagtgaaatcactcttttatcttcagcattaacctttctcgaacagatattttatttttacttcaaaatgcatcctcagcatatgctctttttcttttttcttaacctagctctttcactctatactaaatgttgcaataactctctcatatgataaaaaatgaggtactcttctactttggatgactgagaaagtatttaaagatttatttttaatttaaaatagctttaaaatgggtaaattcaagtgtgaaatcagtattattcaaagcaagaccataacatttgtgtgaaactgtaggaataaaatttttataagttaaagtattttttcattttttgctcagatttttaaaactcaaaaaatatactttgtttattcatacaaaaacccgtgcattgtgcttttctttttttttttttttttccttttttagatggaatcttgctcatttgccaggctggagtgcagtggtgcaatcttggctcactgcaacctctgcctcctgggttcaagtgattctcgtgccacagcctcccaagtagctgggattacaggcacgcaccaccacacctagctgatttttgtatttttagtagagatagggtttcaccatgttggccaggatggtctcgatttcctgacttcatgatccgcccacctcagcctcccaaagtgctgagattacaggcgtgagccaccatgcctggtgcatcgtgctctccttatggtaattctatgataagcatatttcactatgatttctgggtatattctattttttaatctcttttaaataagcatatttattacaaatatccacattagctcaatttatcgtgagttcagatgtgtcccaatgttttccagaaactttattccaactatagagtctctgagctttaatgattttctgcaccagaacttgtggcagacaggtcatttaacaccaacggaatgccacatctccttctggtaatcaaaaatatcctagcatatgtgattattaaattttttacagtgaacattaattttgatttagctagttattgtttgtttttactaacctcagaccttgtgtaaaatcagaacttaaaactgcatctatatgattatcatatgtgttatgactaatgaaattcacaaggatgaacaccaacttagccttgacttgccagatgaaaaacatgttttccaacagaactaaacattattactttgctaaatactaactgcagacactcagtattcttcatgcccccttcagttctcttgtatttctgggactagaagcctgggagctacactccctagactcccttgccagtagggttttgaatttatgtggggttccaccaaggagacaccctgccacaagatttagaaggcagacaaagcagaagccatctctatgacagtgggtgtaagtgtgggtctcccaggcatgaatgtttgcagtagtttctgcattctcctgccattcacctttctggatgatggagttatagaatctgcagcagatttctgcaggtcactgactctggatggcagtacctctgtctctgtagcacgaaacctacaactaatatattttgccagttcaggctcttaatggttttgcaagcacctaattctaacctagctaataaataataaattctggcttttattgggaattctactgccatatggagctagggaatcaagatctggctcttgacacttcttaccatatagaaggcaagatattagaatagtttttagcacttaaaatgaatatgtcaaatgtttacttgcaactaaacctgatatgcaaccttgttaacttcattgtttttctgctgtgtaatgtgatattttaaaaatattggattaaacagtttaagtacatcctatttctctaaccgaatgcacccataaaacccataaagaatgcctggagcagctatatgaaaattctgaaagtaagtaagagcaggtagactggagaagatgactataattagaagtattgcagaacctataatgagctgatcattttttgccccccaaaaaaatttttgctctcttaccattttttgctctccatctgccagcctgggtccaaggaagcctgaatcccagaagtgggtattgatatagaaagagagagagcaatggaagtcttctagttctggctcaagatgtgaaaaaaacaatctttgagtgctcagagagagtggagaaaacttcttatttttctttacctttgtcttcctttggttatcttgaatccctgctccatggcagtagcagtaaggatattggtgacagcacagacctgaaggtgcctaaactctgagggaaaagaaattttctctgtgatcagtgaacctgttgtctcaagagaatgggatggactcctgttgcttttttccctctccgtcctgctgacttttcacccaaatatgggtgtatctgtgggaagagtgcagcagagcagggcaaataaaactcgggctttactgctggaggactaaaaaaaggaactttagggaatcaaaaagtagagacagattatggagagagaggaatttgggtaaatgaactctataaatttgcttacgaactcctgggctcactcctaagctgtgcatgcatggaaccaggcccaaacagcataccaataacttttcgaattgaactaagggattaccactacccaggtctcagactgactgcttggtgacacacatccaataccaatccaaatagcactacaaagtcaaagtctttaaaaatagaacagacattgaaatcaccacccacagaaggctagttggaccttgcaacacgaatctaactggactgattgcctaataaaagaaatgccctgacttttatgttataattttcaaaattatacaggatacaatccaaaattattcagcatatgaagaaacagaaaaatctcaacatacatggaaaaaaatcaatagctgctagtgctaaaatgacacagatgttagaatttactgacaaagactttaatgcagcctttaatgcattgttataaaaatactccggaatataaagtcaaacattcttggaatgactgcataaatagaaagtctgaggaaataagtaaaggatatagaaaagaaccgaaggaaaattttagaactaaaaataacctgaaaagattcactagatacactcagtagttaaatagagagaacagaggaaagagtcagttaacttgaagacagaccaatggaattattcattgataatttagcagggagaacaatattaaaaacaaaaaattagtagagccttagggacctgagtgacaataccaaaatatctagtgttcatgtcactaaggaactagaaataaaggagaaagatgcagtataggaagagtatttgaagaaaatatatttgaagaaaagttttcatatttggtgaaagatttaaatctatctactcaaaaagctaagtaaacaccaaacaggatatatcttaaaaccataaaacaatcaaattctgtgaaccaaatgtaaagaaaataccttgaaagtagccggagacaaggcattacatatagagaaacaacagtttgaataactggatttgtcatcaaaaactacatggagaaactaggaaagaaagcgagacaacagttttcaagtgctgaaagaaaaggacaatcaatttagaattctacgtgcagcaaatatatctttctggaataaaaattaagcaaagacattctctgctgaaataaaactaaaagagttttttttgctagtagacctacaccaaaagaattcctatagaaatgttctcagatggaaaattataccagaagaaaacttgaaactttgagaatgaagaaagagcaatagacatggcaaataaatgggtaactccaatagactatttttctcctcttgagtccaaatatgtttgatgattaaaagcaaaactttttatattatctgatggtattttcaatgaatatgaaaatacacaggacaactacaacataaaagaggaagggtaagacctgtattttaggtactcgtctatattccacttgatgcaataaaatattgattttaagtagagggtgaaaagttaagtatgtatactgtaatgcctagattagccactaagaagtctatatggagatataatagaaagcacataaataaaatcgaacaccaaaaaaaaataatttatgtaacctaaaacaaggcagaaaagataaaacatgggaaaaaacagaggtagctaacaaaaataaaataaaatttcaggcctaatttttaaaaactcagtattacattaaatgtaaatagtctaaacatgctaattaaaagaaaagattgtcaaagtagataaaatatgtgactcaagtatatgctgtctacataaaaatcacttcaaatataattttataggtaggttaaaagtaaaaagataaaaatatataacatgtaaataattctaacttcaatggtaagatgttttatctaataaataatagccctcaaagagcctgaggataaggggatggagatagcaggagctccagagactgagtaggagctatggtgaaagctaggatcccataaaattatgaaccattcccttatgctcccaaaccgtggtcatgtaaggccagaagctgaccaaaataaatggcttagttatggtctctcaagagagtaaactaatttgtatgtattcccatcatctcatctttccaaagacctttctgaagattaaacaactttcttttttcaacatttaaaaaactagtatgccatggaaaaaaacactcaggtgctcagctcccttaaccccagctacaatggagcctatcatgtctctttgccaaaggtagttcattttagtacagtccatctctgcagaagttgcctctttactgaagtttattgttgccatgcttttctccatcccccatcagcatagattgagggtcttattttccactctcatatttaccctgctatcttccaaggaaaaataatactctattaatgtgagagaacaagatcctctcatattctccttctcccaaaaacgtcttgacctagattttgcctgattcatgatattaggaatgataggcattttaagtagtttagggtcaaacatcagtgtcataacagctggcttagccttcttgtactctcacagggcaatccaaaaaacaaaaaaataaagaaaaaaaacgcaaagcaaggctcctgtaggatagggaagcttcagaaagactttgtctagttctgacactgttcacaaggtccagaagcctggaaacagagtcaaagtttaacggggttaaaagaatgggccactgccaaaaaactgtggtacttaagaaatgtgtttgataaagatttgaccttctgtcgggcattgttaagatttgagcttaaatggaattttgtcagatatgttggtagaaatcatatagatagaagattatcattaaaacaaacaatcaaaaaacagcattagcatgaactattgccttttccaaccacagttttgctaaaagcattgctcgttcagatggggaaagtaaactacttgccctttctaggtatatatactgtcattaccctgattggagactctaggctcctgggccagcctcagatcccggcctgaatttttgtaatagtagaacttggtatttgaaagggagtgggggaaaaggtcatgagctgtacacatagtcttaaaattagtcttcctaagagctcattaattccttgctcaatctcccactgtcttcccattgaactcaggagaaattgcatgctctttaaactggctttccctcaaagcaaacggattttgctgtcctttgagcaactcatgctcctttggaagtttgttctctgtttttcctggtgttgccccagtcttgagagtctggttttcctctgtccttctccaagtcttatctatcatatttatttgaaaagcaacatttttttcatttttatagcatttgcatatacgtatcacaaaaaaaggcacagcctgtctaagctcagtgacctattgcctgtatatatcttgggtctacaagaggatcttaaatccttagaagccatggtctctggcttacatttgttttcctattgctaaggcaaaacaattgaactcttatcttagcaaagttcaaaagcaatgccagcttatttgtgaatgctattttagtccatgaatcatagttttcttttgcatatgcacatttatgctactggtatgtttacatcttgatcaaaacatataccccatatgaagagtaaaacaatgactttcttgttacaacatggaaagttgacactatgggtgtcatggccaatacctgtttttaaaatggaaaattactattatagacaaagcacattggtgaatagggctttttattgttaacagatgttatatatttattattaatttgcaagaaaatattctatactctttgggacattttaggtgacagataatatgctgaatactttgctgcctaacttgtgccggatttgtattttattacattaccttgaggctcactgattgcacttagatccagtgtttttgttgttgttgtttcaggaaaacatttgtaacaataagcttttagtaaaggtaggtgctttaaattaactgctaactttaaaatatgagacattttagaaacttctaaagactaaacggcattcttcccctcaaccctagtcccagcagtaagcactatgaacaattcagtataggagctagaaaactacagtctttcaactgtttttgtaaataaattttagtagaacccatttatttatgcattgtctatgttggctttcacataacaacagtgaaattaagtagttgtgacagagactgtacggctctgctgttacaaagcgtgaaatatacagtaactggccctttgcagaaaaaaatgtgcagattcctaatttgctatggcatatacacttccagatttttcatgtatgctcaatatataactatgctttaaaaaaatcttactgaagtgtaacatccatactccaaattgcacaaatcacaagtgtataatgatgaatttttacaaagtgaatatgccccaaaaaacagcactcagttcaagaaatagaacattacctcttttcctaatcgggaaaagaggaagtcaaattgtctctgtttgcagatgacatgattgtatatttagaaaaccccatcatctcagcccaaaatcaccttaagctgataagcaacttcagcaaactctcaggatacaaaatcaatgcgcaaaaatcacaagcattcctatacaccaataatagacaaacagagagccaaatcataagtgaactcccattcataattactacaaagtaataaaatacctaggaatacaacttacaagagacatgaaggacctcttcaaagagaactacaaaccactgctcaacaaaataaaagaggacacaaacaaatggaacattccatgctcatggataggaagaatcaatatcgtgaaaatggccatactgcccaaaataatttatagattcaatgctatccccatcaagctaccactgactttcttcacagaattggaaaaaactactttaaagttcatatggaaccaataaagagcccacatagccaagacaatcctaagcaaaaagaacaaagctggaggcatcatgctacctgacttcaaactatactacaaggctacagtaaccaaagcagcatggtattggtaccaaaacagatatataggccaatggaacagaacagaggcctcagaaataacaccacacatctacaatcatctgatctttgacaaacctgagaaaaacaagaaatggggaaaggattccctatttaataaatggtgctgggaaaatcggctagccatatgtagaaagctgaaactggatcccttccttacactgtatacaaaaaatatctcaagatggattaaagacgtaaatgtaagacctaacaccataaaaaccctagaagaaaacctaggcaataccattcaggacgtaggcatgggcaaaaacttcatgactaaaacaccaaaagcaatggcaacaaaagccaaaatagacaaatgggataaatagagcttcttctgcacagcaaaagaaactatcatcagagtgaacaggcaacctacagaatgggagaaaatctttgcaatctacccatctgacaatgggttaatatctagaatctacaaagaacttaaacaaatttacaagaaaaaaacaaacaatcccatcaaaaagtgagcaaagaatatgaacagacacttttcaaaagaagacatttatgcatccaacagacttatgaaaaaaatgctcatcatcactggtcatcagagaaacgcaaatcaaaaccacaatgggataccatctcacgccagttagaatggcaatcattaaaaagccaggaaacaacagatgctggagagaatgtggagaaatgggaatgcttttacactgctggtggaagtgtaaattagttcaaccattgtggaagacagtacggcgattcctcaagtatctagaactagaaataccatttgacccagcaatcccattactgggtatacacccaaaggattataaatcatgctaccataaaggcacatgcacatgtatgcttactgtggcactattcacaatagcaaagacttggaaccaacccaaatgtccatcaatgatagactggattaagaaaatatggcacatattttccatggaatactatgcagccataaaaaagaatgagttcatgtcctttgcagggacatggatgaagctggaaatctcattctaagcaaactatcacaaggacagaaaaccaaacaccgccgtgttctcactcataggtaggagttgaacaacgagaacacatggacacaggacagggaacatcacacactggggcctactggggggtggggggcttggggagggatagcattaggagaaatacctaatgtaaatgatgagttgatgggtgcagcaaaccaacatggcacatatatacctatgtaacaaacctgcactttgtgcacatgtaccctagaatttaaagtataacaattaaaaaaaaataataaagataagtagaacattactagacccccggaagtctccttcattctcctttcctgccacgaccattccttgactttattctgctttctagcattgtaggttaattttatctgtttttggactttatataagtgggattgtaaattatatgttctatgcctctcttctttggctcaacattaggagtcatccatattattatgtatggcaacactttgttcattcccataacctatagtataatattttactagataaatatgatacagtttacttacccattgtacttttggtgaacatttgtggcattttaaaatttgggttattacaaataatggaggaataaacatttttatgtgtctttcggtgaacatatgtgggctttttgcatgcatttttttaaatgattaataaacaccctgttctgcaagaatgtagagctgcctgagtctgtaacaactgcatagtatttaattgtatgatgtcctggaatatatttccctgttggtcattcagtcacatggcaaaaaccactagttgttgctaaaattcattctccctttcttatatggcaatataccctccacatttttagctaggcagatggctgcctagaataaaggtgcaaccatgttactaagttcttaataacaggatgtaggtagaagtatggcatggcagactccaagatccttcctaaagagatgaatgcctacacactttgcttttgtatctcccttccacagtgctgcctataagcacatactgccatcccctaccttgaggttgagcttcatacagtgaccacaagacagaaggagcctggaccctgatataatcatttgttatatataccttagactgcctatctgggctttgacaagagagagaaatgaatattcatcttgtttgagttacagtgggttttctaccactcataactgaaatagattataacttacacaagttagtttcaaatttttgctattgtacactctacagcagtgaatattatgccatgtatgtttatatatatgtatgtatatatatatatatgtatgtgtgtatatatatgtatgtgtatatatatatatatttatatatatatattttttttttgagacagagtttcgcgcttattgcccaggctggagtgcaatggcatgatctcagctcaccgcaacctctgcctcctgagtttgagcaattctgtctcagcctcccgagtagctggaattacaggcatccaccaccacgcctggctaattttttgtatttttagtagagacagggtttctccgtgttggtcaggctgatctcgaactcccgacctcaggtgatctgcccgcctcagcctcccaaagtgctgggattacaggcgtgcgccaccacacctggcgtatctttgtatttttatatgtctattttgtagaaaaaaaattctacaggtggaattgctaggtcaaaaactaagagcactttaaactatagatacagtacaatgttcccccaaaattacattaccacagacataagtgacatttctgtctgaaatacactgggtgtcaaattgctaaacctcttatatgtgaaagagaaacaaccataacaaaacaaagaagcagtgatcaaaccctaatttcctgtttcacgtctttgttgttggaagaaaatttagaagattttcatttgaggggcctatttttctttcctttttttgtgacttgtctgttcaaatgctttgtctaattttccattgtagacttttttttttttttttttgagacagaatctcactctgttgccaaggctggagtgcagtggtgtgatctgtgctcactgcaagctccgcctcctgggttcacagcattctcctgtctcagcctcccgagtagctgggactacaggcgcctgccaccatgccctgctaatttttttgtagttttagtggagacagggtatcaccatgttagccaggatggtcttgatctcctgacctcgtgatctggcttccaaagtgctgggattacaggcgtgagccaccatgccctgcccattgtagacagtctttataattattttaacgaatatttataatatagtttgtcctttaattttgttttgattagctttattttttatatataatagagcaaacctttccacattcttatcaaatataaggtattcatacacatttttcttccagaagaaatttggagtcaagcactcaacttccaaaaaaacttaataatttgattaaaattttattaaacataattaatttggagaaggctgagataatcaacatataaataatactgaatattctcatctagtcagatgatgtctctccattagctaggtcttacagtctaagtaacattctgtaaatttatccacatagggaaaacttactttttctaagtgtatattaagatattttagagttttcagtgtaaatagaaactctctgcttttacaaattcaatttgattaagtctgattcatgagaattcttttgagtttattttgttttctatctgtcctcttaactcatttttattaattttttatttcattttctgaaaattatatcagtggctgtgtaacttatgtttaattttaatatgtatatcttatttttcttgtcatattgcactggaaataaaaccagaacagtactgaatactgtcagtgaaagtagtcaggctttttctcttactaacagaaattcctttagtaattcatcattaagatgtttaatgcagaattctttagaaaatcaaatcaagatattatgataaagttttaaaatgtcttactttaatacatttttttagtttagggtgtaaccatccaaaactaagttatccttcttctcagttaggcatcatagcgttagtccagttacccagaagtcttagctttgcttcttcttcccctacaacccactattagaatgtcagcaagtcctctcatgattttcttttctccattcttaccgtcctagttaaggcttttatgtcttgaccatgcagaccacaaagaccactaaaaatgagacagataatagatatgggctcccatttctggtttctggtaccaaagtctaattcagcataattcagctcagcataatgctatcaattggtagtgtgtttaggccctattgaaagagcctaactcaagtcttgagacagaaactgaaaaggattatgctggaaaatactgtagaattcagtagtctagaaagctgtattacagaaagcaacgtgagctggaattgtttcacagtcataaagaaaatgttttggccactctgagggatgtttcaggaactagtttcagtcttactctagctatataaccctttcaggtcagcaaaaaggtcaaaaaacagccagagttcagaatgaacatgcatttgagatttttgagaagaggaattcacatctaaagtctagaagaacagatcttagacattctggccataattcgtttgttattgataccatatgattgcaatgacattctatggtgtaggggcaatacttgctgccaagacacaaaaccttgtatgaagttttctggttttggcccctcatgtaacaaagatgtaattttggttattttcatttttctattcctccaagtgccttgccatttcttcctctaatctccagctatttcatgcaaaaatgatcaagacaacttttttttaaagattttttgagagtctcttcttttagattacaagaagacaagaagtagcaatttagcctctaatttatctcataggtgaaattttacttctttcttttttctaagaagtaccgtcagaatataatcttaaaatttaatggttgtgaaacttgactatagaatttgctttctgctgatgctatgggggctcccttctaacccagaccaatttactctgaaaatggcaaatgctttcccctctccccaagaagatggaaaaataagttacattcacttgctaaagataaattaattaattaaaattgcctagtggcaataatgtgttgaattcaaatagttgaaacaagcaattgctggagcacgtacttatgtcagccaatggcttattccttgatgtcaatgttttggctttatttggtgaactggtggttgagttgatccttacttgctattcagactacctctgatccttctgaagaccagaaccatctggatggctcatttgactttgctcagaaaggtccttaatctctaagtacatcagttcaagcacagactcagactgagatggagaaatgaaagatggcccactttgggaggcagaaatgggtagactgcttgagcccaggagtttgagaccagcctgggcgaaatggagaaacaccatctctatgaaaaactgcaaaaaattagccaggcttcatggtgcacacccatagtcccagctattaggctgaggtgggaagatcacctgagcctggaaggtcgagtcttcagtgagccgtgattatgccactgcactccagcctgggtgacagaatgagaccctgtctcaaaaaaaaaaaaaaaagactagcaaaacaaaaaaaagaattcaaatatgccactctcccaggattaaccatttggctacaaagagtaaagagacttctacatcttggcattacttggtgagggtaggaaattatcacatcacattctgttacagtttgggaactacttctaaagaaatttctaatgcaacacgttcacaagtaaaggtaatgtgataccagtgctatcattatatggatttgataaggggaacaattaatgcattacagcctcttctcactagcatctaaggatgtgaaacacatgcaaaattgcagacacttccctctcccatccacatggaatcaatcattcactatgttcttattgacttcacaaattatccatatccattgtggttatgttagaaagtatagataaggaaagataatttactgatctcatagctcatatgatttcaagtatattacaggttcaagtgttcttgttccagctgcaattgttgcataacaactacctcgatctcagtggcatacaattgtattaaaaataacaacatttgggccaggtgtggtggctcacacctgtaatcctagcactttgggaggccaaggcaggtggattgcctgaggtcattcgagaccagcctgggcaacatggcaaaaccccatctctactaaaaatacaaaaaattagcagggtgtggtgatgcacacctgtagtcccagctacttgggaagctgaggcacaagaatcacttgaacctgggaggtggaggttgcagtgagtcgagatcatgtcactgcactccagcctgggttacagagcaactctttctcaaaaaaaaaaaaaaaaacaagaaagaaagaaagaaagaaagagagagagagagaagaacgaaagaaaaagaaagcaggaaagaaaggaagaaagaaaggaaagaaagaaagaaaaaggaaaagaaagaaagaaatgaaggaaggaaggagaaagaaaagaaagaaagaaagaaagaaagaaagaaagaaagaaagaaagaaagaaagaaagaaagggaaacaacaacatttgtattcacagattcacagattttatgggtcaggaatttagtctggatgcagggcagatgcttatatgtctgctatgccacatcgggggcatttgcttggcagactcaaagattaggggtgacaagagctgggagcaggaatcatctgcttgcattttcactcgcacctctggtagttgatgctgattattggctgggacctcagatggactactggccaaattggctctgcacagcctctgcacatgggtttttctgtccttcctcatagcatgtctagcagctgggttttaggaacaaatgtcctaagtaggcaaggccaaagtgcaaggtgttcttatcatctagccttggaaggcacatggcattacgtgattatactccattggtcaagatagttacaaaattctgccagcttgacactataggtttttctttgggggctcagaataaaaagacaaaaaaaagcctctgaccgtttatctcttattcttttgaggtagttttgtgttatataaaagaaaaatttagggatattgtcctatttcccagtgactgaaggagactgtgaataagagacgttgacatctctctatagcagtgccaaagagagaggtatccttgtctaaataagcaaggcaggattactctttccagactctgatttgaaagacagcagatagaacgtcaggtggaagtacctctgtcggtgtcgcctacaaagcaacatgtttgaaaactctgtgtgtttcaacttaggagctcagcagtcagtctcccagatgtggagctatttggagagcaagcttgtgaagaaggcccaggaaacacaaagacagctcttaggatacactttactgaagatatcactcagacaagatgcccaggaagttcaggatttaaaaaggtctagagtcttctaactcacttcctgtggaagtttattgtgaacaatagtaacaaagcagcctcaattctctaatcctgcagagggttaaagaacacctattatcccctggagcttaatagagatgaaatattaggatataagtataagtgcttaggaggaccaggaagatggttataaacacgttatacccaggtttaggtgaaaactacatgtaaactattgtgaggtccttgattggttagatgactaagatattagttatcttggaagaaaatctggattgataaatgtgagttgaattagatgcactaaacataaaaatagaagacagaaaattgtcctagtaataatcagcccatccttgcttagcacagctccagtattccaaagatttcagttgccacagttcagttcaatgacatcagtcccccaacaaccacagttctgatttcagttgctatagtatattaactgtgagtaattgcataaaggagaaacttcacttctagatcttcaacccacaaatcactacatgcctaccagatgtgcatatgatcagtgaccaatcatgccacttctttcaatgtctattggtgattggtctctgcacattttttattcaatccttacactggcagcaaagcatgtagttgtgtttcttccttttcttctagtgataaaactgcataacattttcaaaaatggctaatcaaaagagaaaattggccaacagatgaagtgtcacaaagatcaaagtacagcaaagaaacaaaaatagagaactctatatgatggttaattttatgcgtcaacttggatgagataagcaacgcccaggcagctggtaaaatattatttccggtgtgtctgtgagggtgtctgcagaagacattagcatgtaaatcagtaaactgagtaaagatcaaatcacccacaccgatgtggtcaggcatcatctaatagaacaagaaggtggaggaagggcaaatttactctctgtttgagctgggatattcgtcttctcttgcacctggacattgggactgtggttctcaggcctttggacttggacttttggctgaattactccactggctttcttggttctccaggttgtagacggtgaaactttgcagcctctgtaattgtgtaagccaatttccataataaaataaatattcatatatatacacgtatacatcttcatgtatattataaatcttcacatatataagataaaataaatctgtgcatgtgcgtgcttgtgtctctgtgtgtgtatgtgtgtgtgtgtgtgtgtgtgtgtgtgtattatttctctggagaaccctaatacactctgaaagtgaaattcaagttgagtattaatggagttatggaagaaatagctatcggagggaatattgccactgtttgagacattccagaggaacttagggaaggcaaacttaacaacataaatgaagaaaatggatgtgttcatccattttaggataaaggtatcctggaaaagttacactggcaaaaaaaaactcacattaaaggaactctcagaggcatttcatgacattgaaaaaacaaagaatagatagttggaagctgattcaaacttagaaaggagtatgacagtttttcagggcatagtaaagatgctcactccatacactaagtcctacaatgagaagaggagggcaacctcattcaaactatactccatatttacaaataaataaaatactttatttcttcatatttctgatgttttaaattacagtatactaaataattattagttgtactatttttaaaaaatttcctgtgcatttataacctacaacaaaggagtttttaatgtttcaacaaaatatttttaaaggtcccagaacaattgtaagtttccccttcgatgaacaagatcacattccagtttctgtttgcacagtcatatctgtggttcctcattagtgtgaaaagccagaactgcctgttctagggagtggcagtgggaagggaaatgaaatggtatatatggagtgaagcaaaactgtaagggccatgactgagtggctgtaaagaacaaagtcagatgtggtgacagtatgcctagcagagagaaaaaaataagtgcactgttattagaagaagaaaactgggaagagacctttgtgtgaagacaaactccaggagaaatatagttgagaaaaagagagttgtgagctttgggaactataattacttaagacaaaatcagatgtgtgaaatatgggatgcagtggtgcaccaacatttgacaatttgtgatacgattggaggacaagaacacaggccattgtgggtatagctaaaaggaatacttctcattctcatgccatctcctgtgccagttaccatgaatttagtggggcaaattgattttttgaaacctacctttaaaaagatttttaaaaaaagctctgaatcttttaaattttgctggtttagacatgattttttaaaggtagggttgtcctcattgaggatttgcctctttgatgacaaatgtcttcttaaggagatgttagttcagtgatgttgtttcagcattcaggccaacaaaggcagttgaagaggaatgcatgccgggtgtcctagagttcagcaaaaaaggacttgctctaggggaggaattatgaacaagaggctccagctgagctagaagatggtgcccagcaggagggaagtggaacagacagattcctgctcttttagagcttcaacgatgaagtctattgttctgtggtttgaggaacactcatcattcaccatagctggttgacatcatttactaagttgaatcaagtacaaaaggaaaaagttctttatgataggccagattccatgagtgggaattccttggagtgaaacagggagaaaatacgccccagtgttaaagactttccagagattttttccattccactttccacccctccctaaatcactcgccaaagaaatgctttgctggacactaaagtggccacagctgtgctcataagaaaacatcagaatataaaattaatcgttgtattttttagttaacctttttggagtgtgtgtgcagggttaaaggacaggtgctattaagatgatagacatctttgaaatgtttggaagtactgccagtttctatgaccaaaagctttccaaacagctgtaattatttgaaggtcaatgaactaaaagtttccctgtattagctttaggcaaaaaggtcattaatgctttaggggactgtaataaatctgaaagaagctggcttgaccctccccttctgcagttctctatctgatcaccctgagatccttttcaactccagcttcctgggaggccagagatgagccagtgactgactccttgaccagccacacagggcctagagttgtaccctacctggattggcgaggtcttccatgacttatgtagcctcatcctcagatgaggaccaccacccaatcccctcaaaaagcctgaaatcagtcttctatgctaggtgtgaaaaaaagagaggtaattacactgttttattccatcagtgtttgaaaaaagtgcacaacttctatgcaggcatcccaaagcatctaggattgcagggatggatagaaagtccttcaatcacaacagaattcctatttggctctttaaaaaaggagacaggacaggctgacagatgctacggtgcttagacccacatgttgtccacaaaattgggattatcctctaattctaaaggtatagctttggtgaccgttttgccattggtgccatctctcaggaacctgataataaactacaatgttttaaacttgtactatatccaggagctatgtagatatataaaatattttcttatttaaattccacatgtgtacaatgtaggtattattttcattgcaccaatatgatagatgagacaataattttctcaaagacactcaattaagttggctgactgcaaagagttttaggcaataagatttacattctttacctttagcttatcatcttccaaagatgatgctttaatcattgtcagctggttattgatcatattgttctttgagcccatccccatgggatttgaaaaatctgcttctaagcatatctggaacttttttacattttcctttttttttttttaagatggaagtctccactatgctgcccaggctggagtgccatggttattcacaggagtgatcgtagagcattatagcttcaaactcctggcctcaagagatcctcctgcctcagcatcctgagtacagcgtacaggcatgtgctaccatgcccagccatatcctgaggttttcacttacaataactgaagctcttaccttgccacctcaggccatctactaaaaaggcatagatattatttcagggaaagaaatgcctggctgcaaatattttccttcaactgacttgatagttctgttagtgtcttccaagcatagttttcaattcagggctcatgcaatactctttatctattgtgtctttgttttcaatagtaataatatatgaacttagaataaatatgctcttcttttaagaatttacaattgtgtgtgaatacaaagactgcaaaatatattaaagagatttattatgtaagagattcattatgaaagagtttaaagatgaaagaaattcatcaaagcgtttgtatatttcaagaagaaagtatgacatcatccaaatacatacatattgctaggttaaatattatttccaccacaagataaaaatctatcctcctctgtgctagtgtaaaactcaggagttggcttcttcagctgcccttggctctgaaatcttcaactggccacccttagggttccaaacacacacccaacctcacgccccacgcagagttactttgcgtccacacagctgagctccatgtggtgttttaacggtcataggatctaattcccacatcctcttctgagagctgagatttatgatcccaataaagattttgacagaaagatgagaagaacttagtttaaaatgttgccctgaaattccctactcatcaccccattaatcacagattaaaataaaagcacatatgagctaatatcacagggtctaacagggtgaatatgttttggaattagcaacaatcccttaataacaatgtattatctctgaaattccctttcagaacagtgaccttggtttgaaatttaaaaaaatatatcaggcaaatctgttaagacataataaatagggagtggctaagacactctgaaaacagatatcaaggaccttaccttcttatgtttacgtttaatcatttaacaaggaagcaaactttacatgattagtgaggttctggtgtaagagatgttttcatattccctgatgaaacctcacaaggcttcccactaaaacacagcagggatgagagtgcacctcaccacttcacagcccagaatggtagcttacctcgtttcagaatttgggaacagtttccaccatctgtcctaccaaactctcaaactcaaccaagaaacacaattggtggctcagacctagaaatggagtaaatctgttggcctgaataaaaggtcaaaaatattctgtacatttctgcagaaatctcctcttcatctattgcaggccttgcttttccaggcaaacagaataaggtttcctgtgtccttctgatccccactcacctctccaaaatcctaagtccgtttctcatatataatatgtcctattttttacatctctgtaacagttttaaaaagataattgtggaagtaatatatgcttatttggaaacatctggaaaactagaaaactacaaaaaggaaatcatcaccagagacacccgatgttcatatttcagccacttcactattaagctgtttagcagcgcttgcccttcccgtcagtcctggtctccttgtttgcccttcctcctagatgactatttcacattcttctcttcttcaaatctcaacatttcctctctgcttctcactctcagctgaaggcttctgtttttatatagaaggaatcagaatggatcattctacaaaacgcagcaggtctccatccacttgggtttccccgtctcctagggccaaccccctactttgcactagaacctgttccccgctcctactcaaaggctttgctcctggaattatttccattcccacctcatcatttttttttcttaatgggtcattgccaagaaaaatgatgtaccataacatcttgaattgcaacttttaaagacttcccatttttctgattccccaacatctccagagaaacaggcttgtgggcacttttcccagatgaccaggtgcaccaatgtgacaaggctggtcttgccacaagtcccccttcttgctcttccctgactgtggcctagtgacattcaagcatacccataatattccctcctgcgtttgctggcaaaccccatcctgatgcccaataagggtgcttgtccacaggtccctactttctcttggctcctccactgcttggttgagcctgctcccttggtgctccctccaggtgactcctgcaaggtatgttgtgcctccctttgtagaacctgtaaatacagtaaatcctttaattcatatggctccccagtgtaatctccacagccgtactggactgttgcttaaagattccacaaaaggtgcttactcccccatttataacacttatctccatcttaaaaaaaccctctcttgaccctgtatctttctcagctcctacccaattttaagcttctcatttccaagaaaagtgcttgcaagagttattcacattcaacatttgttcttttcttttctcttcaacttactgcaccatgggcaacaagtatacgcaagttgctaaatccaatgatcagtgttcagtcctgaggtaatatgaccttgcatcatctttttgagactgtgggtcatgctgtccatcatcacacaatttgttcccttgacttttatgacacctcctcacacttgcttggttttcaggttacttcactggctctttcctttcgtaaggttggatccttatgtttccaaccagaacctgctacataatttgcaaggtacagtgcagaatgaaaatgcagcgcccttgttaaaaaattattaacagtttcaagagagtgagagcagagcattcaatcaagcaccggttcctcctaagcaagaggttttgtgcgactgccaagatcatgtggccatgaagcaggccctgttcccatcctcagaatgcagcagagcacttgctcagtgctcatctacaaatgatctcatccacaccagttggctttagatgccacactcagcaacaagccacacatcttaacttcaacactaatctctccatttaactccagattcaaatttcaactgtctattctctatgtgtacttgaatatatagaatgcactcaaacttaatatgtccaaaatggaactttcatttcccacccaaatccttcccacagttctccctatttcagtaaataccagctcaatttttccagttattcaggccaaaatcattatagccatcctgaaatattctctcacatcccgcattccatccaacagatcctgcaatctctaccttcaaaatatttcccaaatctgactagttaagatattcaaccacttgcaccctggtacaagtttctgtcctgagtcacatgctatcatgtgatttaaatgttcgaaaaaaaaagataagggtgattagtgatgactagaactattgcaaaaatcattttgcaataaaggcaataaagaagggtcagaaattcagagcaatgtcataaagaaatgaactgatctaaaaggcagacccatcacagggaggaaatttcaaaggaagaagactgggcctaccaccctgttaccttggaaataagtaagaccaaagggtgggaagggaaaagacttgattcttttcagagaacaaaaaagtctgtcttcattatgcaaatacatgcaatgcacagtagtttgaggaacactaatggaatgtttttattgcttttctttgtaaattacaaattgctcattcctgaagatgaaattaaaatgagccattgagtaaattacttccaaaacaagttagtggaaaatgtgtaaacctgtgagtgagtaatattaaatccttatatgtttcataggaacttaaactctaggcacacacaatgttttatacctacaatgactgtactttttttaacttattacataaaattacatatattatagtccaagcacagtggctcacacttgtaatcccagcactttaggaggtcaaggcaggagaatggcttaaggctaggagtttgagatcagcctggacaatacagcaagaccccgcctctgcaaaaaaataaataaataaattagccaggagtggtggcacacacctgtcatcctagctacttgggaggctgaggtgggaagatcacttgagcccaggacttcaaggttacagtgagccatgatggtgcccttgcactccagcctgggtgacagagcaagatcttgtctcttaaaaaaaaatgtgttattgaaagtttagaacatagctataaacataagaagaaaatataaatcaaaacaaaacagccaatgtaagcgttttggtttataatattccagattttttctactaagtaaatatatgattataaaaaattgtagttattactacttaatagcctgttttgttgatgaaataatttttcatgaatatttatcaatgtaattatgttattgtctcttgtaagctattagcataattatataaataacacattattagaaattaaaccattttacagtttaaaagttaaagaaaaaaataaaattcaaagaggtcatggcatattagtattttaatttgaggctggattgatttgctaatattttccttataattataggtttgttattgtgggatatttgtcaggtattgatttcaggactatgctaatttataaaataaactaggatattatacataaattagaattgttttctatgctttaaaacaatgtttttcaaattatctgtggtgaaatcctttatttcaatttcctatccatcatgcactgctattttggttaaaacaaagcaaaaagaaattactagaaaaataaaacaagaagccaaaaacaatcgaaataaaagcttaatttctttatgaatagattcaataggcatcaggttactctaccaaattgctgtaaaagtttctaaatgctgactattattgccatatttatcttgaccacgtaacaaatagttgatgaccaccagcagtccatggaccacattttgaatagccctacctgtaagaagaggcttattctttttaataattcacatttatcagcaaatttgctgttaaaatgttaccatattatatgcattttgatttatttacaaatcatatctctaattaaaattattttaataatattctggatgcttagattttaagtactcagcatcctgaagacctcatccttttataaactaattcacaggtacaatatacaattaaaataaggtttgctcttgccgatactgtgtatggatctctattttccagtaacattcctgatcatttaaaattattcagccaatgtttttaatatctgatgaggtcatagttgtgtctgactcataatgtgactgatgaaatcttttctttgaacaatcaatagtaaaagcatcatttaatagtgctctctcttcaatctgtggcttctcttcaggaatataatcatgccatttgtccattttgggaggattcctttaatgacaactatatggtagaacccacatagttgcaaattgcagtgcagtgtataagagcaaacacactgttgaggggaccaggtggcacccatactttctttcaagaatatctgtggggccatacatgtgcattggccatttgaccataagaactcagagaaggagccaggtcaatcagttaaataaatgctattacagtgaaattgaaatttctttcttttattaagaaaaataaagttctattttttaatccatcctaatggatttttaatgcaaacttcatatttaaaaagaccatggctttagaacaggcttctcaaaggacagtattgttctccgagcatctgtttatttaaaattcagattcccagatcccatcccacagctactgtatcaaagtcccaaagagaagatggggagaggagaggagaaaggagtccatgtgtttaataacctccccaagtgattcttgtgcacatatatatatatacatacatgtagatatgtgggggaggacagagtcttgcttgttgcccaggcttgagtgcagtagcatgatctcagctcactgcaacctccatttcccaggttcaaatgattctcgtcctttggtctcccaggtagctgagactacaggtgtgtgctaccacacctggctaatttttgtatttttagtagagatgggttttgccatgttggccaggctggtattgaactcttgacctcaagtgatccacccgccttggcctcccaaagttctgggattacagccgtaagccactgtgcccggccaatattttgaacaccaatgcttcagagcaattttaaaaataatcataggcattatgtatgattctcaaaggcatcttgcataaaactgggcgggcacctttattgtgaagcagtttcatactttctcatctttttcagcttttttccctatcatttgaattagcctattctttcttctgtttcttcttgagtcaatgttagtaattttttattctcctaggatatcataattttagttggcttttaatacaatcattgtaaaaattatatttagaaaataatataatatccttttcttttccatacctgtctgattatgtatgtccctatatagagacacaaactcctagcgatatcttcagtttaaggaaaatgggagaacagatgtttaaaatttatttagcttgaacacaaagagaatacaaactgttagagatatctttaaggggaatttgagaagagaggtttaaaatttatttagctcaaacacaaagaaaaacaaagacagtcaagtttttgaagtccacataaaagatgatagtttttgaaagctgttagttgataagagccaagatttttgagagaataatttttggaaatcaaaaggcaaagatttgaaagataaaggtataaagttagcctacaaataaaaaattaagagtgcagttttccagggagtcaatgggatgatagagaacctgacaagaacggaggtcagggtgaccttctgcatggcttggagggatcacacagagaagagcagagatcatacttggaaagaactcaatctctgccctgaagaagaccattatggccagcccaagggcagtcaacaggcgacagagctaagccatgctgaaggctgtctgtcatgttcagtagagtgctgcactctgtcctgccaaagacaattgctagcgttgcttttcattgtcccccgtgaaggttcttcctctgatcgctgcttacaactcatcccatgagcacccagtagaaatgtcacccgtgtacatcctgatgtttcagtcagcccatctcaactgtactataaacatttatcaataccccagcactttttaaggcccgtataagaaagggtagaactgtggacacgggaagggaccgggtagtgcagaaggaaccagcagctcaacttgggtggtttcagaaaaaacaaaacaaaaaaacagttcaaaacttcactttgagccaggacagtggaaagagccacagctgtaccattagtgtcagtatttttagcagaacctacctcccttaggcttcaacttctcttactggaaaattgcaaccactcgttaactgatctccctgaatctgttctctccaccctccagtcttttctgtacattgcttgcaacaattatcttccaaaaaatcaaatgtggtcatgttgctcctctagaaatttttattaccttgttgttacatacaagaggaaggccagactcagcagcattaactgtactgcccttcaaaaccgaatcccagtcaaaattttagcctcatcctatgctggtgttttaacttgtatttcagccattccaaacaggggagagctttttcatacaattgaatattcacttactgttcttcctcctagattatcatgaacttggttctctgcccagcaaactccttcccatctcaacctcttctcatgaacctacaaaaattatttcctttctctgccatttaccgaggtgcttcattcagactcacttaaaggcatctgtcagatccttgtatcatgatttgctcatgtgtctctctcaccactggactgacaacttgagagcagtgacttccttccacttcctcctaggagccaccctataaatgtttgttgaatgacttagtccacaatgagtgatacagctgactaatatgaaactaaaatgacctttgttcacacaacaaactacattattttgttgttattgttctgatccagttttttttgtacttagaaatttattttatttgttcatcatgcatcgtttctccagatttggccaatcgttccagcctgacaagatagttttatgtatcacctttttaaaattttgagtgttatccaaggaataacatctctttcagctgcatcttcagcaacatttattattgtgccatcaatttcctcatccaagttataaataacaattctggacagagtgttttacatgacatttatcttatcttctctaggattatacttatttcttcttttcttttatcaactggattgtgaactcctcaagatgggcatcatagatctctcatgtttatatttttttaactttcttgattttagtaaatgctacagaatatccaatgtcccttgataatggtggcagaaagctgattctggattcagatgacctaggatcagatcacagttccccacctgggtgtcaacttagacaagttcttcaaacccttcaagctatcgatataacattttctcatatacaaaatgtggaaaatagtagtacttacatcatagaattgtcttgagtgaataaaacagataatgtatatagaacatttaatactatacttaatacagagtaaatgtttaatataataatagagattattagaggtgttgaataaaataaataatggaaatatcaatgtcatcaaatctgctaatttattcatcactgtctatttgctagggctgccattacaaagtaccacagtctgggtggcttcagcaacagaaatctattttctcacaattctgaggcccgatgttttgagacctttattcttggttagcagatggtcatcttttccttgcatcttcatgtggtctttcctctgtacatgtctgtgttctactctcatctacttataaggaccccagttttattggattacagcccacaccaatgaactccattaaccttatttatctctttaaagacccaatcttgaaatacagtcacattcttaagcactgaggtttaggataccaaacatgaattttttggggtggaacacaattcgggctatgacaatccgcaatagaggtcacacccattataagtaatatctaagtagccataaccaactgtataaccaataacaacttcctggctcttcttttgtttctttgttttttttttgagatgaggtctcactctgtcaccaggctggagtgcagtggcatgatcttggctcactgcagccataatctccagggctcaaacggtcctcccgcctcggcctccagagtaattgggactacaggtatgtgccaccacacctggctaatttttttattttttaaattttttgtagagacagggtttcctcgtgttacctaggctggcctcaaactcctggcctcaaacaatccaccgactctggcctcccaaagggctgggattacaagcatgagccaccatgcctggccacttgcccttcttttaaaaggattatatgtccccaccttctgcaatttgattggcagtgcctccaatggaagggataaatattcatgcccattgccgtcaggctcagccatgtgacttgatttggtccacgcaaagtgagtgtgtgtgcacacttcactaccaagcagaagttttaagagccattgattgttttctttagctatcttactcttttctgtctgccacaaggaccatatatctcaaataagcgctgctccttcagcctagtgcccagaatgagcactttttagctttcaatgagacatattgggcagagctgcctagataagaagctgctgctaatgcacaaagtcaagtgacaagtatatggttttggttaagtcactgggatttggagggattgctactgcactaaagctgccgaatgtgataaccaacaatgtattatccacagatgcatatatagctcattcgttttccttaaattaatggaaggaatagaaacctgatatgccattgataaggtaattctaataaacccacactgcaaaaagaggagcagggtatcaaaaatttcatgagggatcaaagacttatttattggacattggacattcttagtacttttcccatttatattatatgtaagaacatgggagcttccctcatgcgtaaattttctctcgaatatacaggaattacagattttgcaggcagaatggcagcttttcagccctgctttccttgttctggagagaaatcttcttctgttcttggagaatcacagtggatacagaaagtaggaactgtctgctctcacttggcaaacacaaaggctctgtaatgcggtagcacttcactcacaccagtatcaaatttaccaaaacacatgctaggttcacaactcaattaaagaaccattcttcaactttctcttatttcccagtttctaagtgaacgtgacaactgagccaaaatgtaaggaatgagcaggatttgagctgctcagacaggagaaagacatttaaggcagatggtgcagcttaaacaaaggcacgaagtatgttggaatataagccgttgagggtggttggagcagagggtagaggagtggctacagataggattgacaacttagctggaggaccacccttggaggccagtgtccttggttctacaccagagcacaactcaacaaacaatgggtaaacacttttaagttttatggatcataaatttatatgtttctacctgattttaaaatgacttctccataataaatacatcattttgcatagcagttaaaaacatgggtattttcagcagacagctgaattccatactatagcttctccatgggtgtgccctactgaacctgggtacattgattaacctacctgaggctcagttacttcttctgaataatggtggtaatagtgatcatcatccttctataatgaggatcattggctataaagatgcatgtaaattcttggcaaaatatcagtgtcaaaagtaaaagttccagaaatggtgctttctgaaactgttgttatcaccattgttcagaaatgaaagcttagtcatatgcccctatgaggtttgaccacctacaccccttagtcgtgctctgacattctaaatactgcttcttatctgtcctacaaggtgcttaagacaaagtcaggaagagacatgacaattccttgattgatgtggactaaatgcagagccatagttatgcctctcagtgcctgtctcaactcaaacagggctaagctcacacagttcaaaggcagctcagctgaaggcctgtctttccatggtgaccacaccagatacaatcatggagcaggaaagaaagagaatgtccctgatgactcctgttctggagactctctgggaaatcagtcttcttggccactatcaaggcttgggggcagcttggattgaaaactgtggcactgcattagtaggcaactttcctccatgaaaatattatttttctttcctttattgaattactggcttcattattttgaaatttatttgggagaggaaatttctgccttccttgaattaaaacctgtggttaggcagcggttcttttgtacgtatgacgtttgctagggttttgaagaaaggaagggatgaaggaaaagaaaatgatgaggataaaaccaccagttgtcttatttcttcttaaatattttctagtttcagatgaaagtgtttgatcactgagtatttaaaacaatattgtactgtgagaattttgagagagtgttgtcagagaaatgaggaatggcatgatccagaatcatttttcccttttcccacaaaaatgaaaacatgagcacagggcttaaatggacagtaaacattggtattttttttttgcactatttccccaaaatctaaccagaaaagttacttcccttatcaatcacataatcttaataaattatattgacctagtttatgatatggaatatcagttggagtgtcctagctgcttttttattgctgatgggttgagtgttccccttaaataacacatttctattaggtgatactgactattctagataatgttgttttaaataaatgaattacagcaatcagttctctctctctctctctctctcccatatctcctctattttcctctctgtctgtctcttcttcttctttccttctgttctctttctgaaattcttttgtttatctaccattcattcatttaatctacatttactagcacttaaagaagcttggagaacagagcagggaagacttggaaagaatcataattcagaaagatacagcagcccctcatcaatcataaaggtaagatttctcaaaatagtcaagggaaaaaattaagttcttaaaggcataaatcagatgagtgttttgaactaacatgcaggccttttaaactgcctatttttattacctgcaataaccaaaatagaatgtcctctgtttttcctattttcaaacttcaagttcatgactacctctgactgggttcactgagtttccagagacacagagtggtttgacttttggtgtgaagggtgagaaaaaaattattttaataactggttaacttggtttgcttattaggcaaataaattgatacatatctctgcctaatttttaggatatagcatgatgttgatgacaggtggggaattacctgttcatcattgaagctccagaagatgtgagatgctcagctcagagtctgtttgccaggtgtttcttctcacatggcctggagggaggggtgggatgacttataaatatgcttctgccaaggagacagtgaatgcccagactggagtatatttcttaaaaaaaaaatacccgcagagttggattaaaggaaagatatgtgtttacatccattttggtgtattactaccctattaacaataaatgcttttatgtttatgttctgttaaaaaaaatcataccagtagtcaactctcatggaaacaactgacttaattagcaaaataccttaattaaccacttgagattaggagctgagtcactgagagcattggttagaaaacaacaggacattaaagaaagagctcaactgctctcagttagaaaaacacaggaatatgggaatgagagaggagaaaagaaagaagattttttttttaaagagatgaccaagtcacgtgcctacaatttccatgagaattttcagaaatttttatgtccaatcttagggtgcattctgtactgcctgtaagctccttctatctgcctaaaattgcagtaaagaccttgagtaatttgtttctttgtaaaaataatagaaaggggttggatctatgttcaatcagtgccaagatgtgaataacaaaaaatagcagcaagcatggggcatggaatgattcaccggtacctggaagtcacggctagagcttattatgaggacataaacctccccaagaatttaaagtgcatgggtaatggaggcaaaattctgggcagtaaggaaaagaaatccagaagtagagacacatttattggaattacccaacaaagaaactcactgctggggagtgattactgtatattcctaatggagatttgcacaaaaccttttggagtccccaaggatagaatgactaactgagttgaacagaaaggaattcgccctatgtatgagaatttggttgaatgaccacttgctcaatgtagtccgttaatgatgactaaagcagacagttcttgctagacaaaatttccttcaaattcctcaatataacactcctgctagggggataagtacaatccgctaatgagagccattgctggagtgcccaaaggccattctctgattggattctcctctccatgtcctctctaaaatctcccctgtcctacagggcttcagcgttggagcatctgagtaccagccaggtagacaagtatgaggagtttgctttcagtcataaagcattcaaggacctgaaataagtccaggaagaccaccctttggtgtcccaggaggaaaatccttaattagtattgagttagagccagtaaaaataagttcccacatccaagagtataagctgagccaaatcaggaagagaaacctagactagaaggaaaaaaaattgtaataagatgggagaaatttaagggataggacagaggagattgtctcagttgaactgatgggtccctggcttatatgtatttgctgtcagccatttggtttgggtttctggctgtgttggttcaacttaaacgtacaggttcagtacaagttgtgcaaagaaaaagcacagagaactcaatggtagctgagtcctcacaagagtgacagaacccagaatgacacagaagttctggttaattccccaaatcagtgaccaaggctttgtggtatagttgaaagaagatcaaatttaaaggaaagcaagaatgattgattccaaacttgttgaaaaaattactagttttttgtttgtttgtttgtctttagttcaggagacctgcttcatggatctgagcctatacaaattaaaattttaaaaaaatacctactttgccaggctgtctgtaaggattaaataaactacgcctgtgaaagtaaatcatgtagtgtttagcaaatattcatttgcatctttttctccctgcctcttttcttccctttctctctttctttctctacccttcctctttatcttccacagtagatacctgagaagtatttctgcctgagaatcagatgcaccaagacttttactgcagtctgattttcagacattgccacagtgaccttcaagtgcattaatgtgttggtttcctttcatgccgtctcagctggggggatgctttgtgcccacacagatgtcagcagagggtgattggagccctgagtcagggtgccctgggaaagatgagtggaaacctcagcaaactcaaagcatgtgttttatatatcaggagagcacacaagggcagactatctgtcaactgtttccagtgatgagcagggaggccttgcggccagcaccccaccagtcactgttcacacctcctcagaggtgacttattctcttccgccctgtagcaaatttatcttaatagctaaaatgataccagtttgggaacatcctctcaaaagcagttatccatagagttacaaaacagggcttaagcagaccatataaatattcataaatattcatgtgacaaaaattgacgaaaattgtgcattatttattttctaagcagatgaaaaaaggcaactacaacccaggaaaaaggttttgtaaaggtatctacaagaggatggtagctgaaaccatgcaacaggatgagatcactcagggagggagtggaaagcaatatttaaggagcagacagagaaaaatgagattgaaaaagcatagccagagtagtgggagtatatccagaataaagtggtatctctgaagaatcaaggctaaaaatgtcaagatggcagagggctagcaggctaagagtatagattgacatgcaggttgaggaagatggaaaagcctttcaatggtgtcccatttctcttaggataagttcctgcatttctcaaaatgcccaagtgtccttcaacctcatctcacattgttctcattctcccacttccaagtctctgttcccataccactggctttcttatagtttccccaatatgccatgttccctcctatcgcagaggctttgtacgtgctgttcctctgcctggaatactcatccctttagatgcactttaattcatttttccagactcagatgaagcatcatttcctcagtaaagccttccctggccgatccaggtcaagtcatattctttaattttatagaatcttgcttctttccatcttagtactattcccaatttataattatgcatgcatatgtgttttttggtaaacatgtctcagccactggattgtaaacttcattagaatgagacttgagaaattcttaacacagcaagattttaaccaaacagcaatggttaccaactggtataaagtttgatgtagaaagatacttcctgtacttttttcccattagcacgtgcataaacaaccccatcacaattgccttggtgtttctccatgatttggcactcaagacgtaccatggtccatctcaagcctacaagcttgctggttaggttggtattggataagccataaagtagattttacagttactagttcttagtctttggaagggccataagccccgttaagaatctgatgaaaactgtattcttttatgagttgaattgtttcccctcaaaagaaacattggagttcaaaccccagtgcctattaatgtgaccttatttggaaatagaatctctgcagatcattaagttaaatgtggtcgtttgggtgggacctaatccagaataactgacgtccttatataaggaggaaatttggacacagagaccaaatttggatgcaaggagacaaccatcgacaagccaaggatgcttggcactaccagaagctaggagagaagccttgaatagattcttcctcacagctctcagaaggaaccatccctgcccatatcttgatttcagacttctagcccccagaactgtgtggcaatatgtttatgttttttaagccactcagtttgtggtactttgttaaagcagacccaggaagctaacagagacactttctgtagaaataaagttacttgaagacatacccaactttgcatgcaatttccaggtgtttacagatccactgatgaccagattaatcattttatagtatcagatatgctataaaattcctaaaccaaaatctcccaagataaaggcaaaggaaagaagaaaactggcatcagcaactatttgttacatgtttggcccttgcctaggcatctggcatatattacttcactaaattctcaaagctactctatgaaataaagggaaatagagacccagagagactgaacatcatgcagaaatcagcacatctagagagttaccgtgctgggaacagggcctgagttttcttttcccctgaaactagtgtttttttcattcttgccctgcttctgagcatgagtgacctgtaagagccaaagcacatgatatgtggcttcctggattgtgaggttacagtgagaccagggttatgtgtgtgtcagtggcttcaagggaaatcggagaagagtttttttaaattaagaaggaaaaaaagacccttctttttgactgctccgcattattttttggcattatgataacttctttggaactctctaaggattttggtatataagaattttggttcttgctaggcaagcatggagacaacaaagtcttaagtcaaactgataagtcaaactgatgaggccaattatcagcaagaactttaaattaggattttcagagtcagagatgggatagtgggggaaatgacacagcaaagcaaaagaaattcaagtttttgttcatgcaatgatatttattgatcacccatgtggagaaaggctccatgctctgtggacaaagtctggccacatagagccttgtgtctagtggggagaccaacagctccatcagtcaatacaataaagtaaaatgtatgataagcaaagaacaatgtactacaaagcagattatatgagtaactgccaatttcttgttggggaaaacactggatctaagtttaccctgaagtctgaatagtgattgtcctggacagggagataggaaagaatggttccaggcagagaaaacacatgtaaaagtcctgaggtgacagaatataatacacttgaagacatgaacacaattcaccgtagactaaatgcagaatgagaatggggcaaaaaaaaaatagtaatttcagtagagaggtactgaggggctggtttctgcagggacttgcctgcagctatgatggagattgtatttccttcagagagcagggcgatgcctttaaagatttgcaccatcctggagagagggctactggctgtgggaatcaggcaagtcattgaatctctctaagtctcaactgtctcataatacaggataataagggccattgtgaagaataaaggggtcatttcacacagtactctcagaacagtgccccaggaaacataagccttcatattagaacgatgacacaggcaagccctgctggagccctgcctttgtcagacacagtagtcatgcttttcatttcacctgctctccttagaaccactccccagtggcaagtgtggcagcaatgccctgtgcatggtgtctctggatcatatagaagtttcaacaggttggtcctattccacattggttttcctgccaccatcttcaggcaaagtctgcaagcctccaagtctactaggatgtaggcaatgcattggggcagggcagcgggcagagcccagggcactgggcattcaaaggtgagttgttggccagtggctggccttgaagccccacactccatcttagcttggactcaccaaggcttatctcctttgtgagttgtcatgggcttgcagagacttactctggaagtatgcatgcatctgcatcttcatgccccatagttttttgttttgttttgttttgcagcttttgaaaagtttgaaaagtttttgagtttggttcactgaggcctggggatggtaatatttaaaatatcaccctgtctctctgctatagacaaatcctggaaaattcagtttagttgagagcttccttcttgtctcttttaggtgcaattttgactcagtcaaaatgtgtatgcgtgtgagtgacagctcttctaaacacagcatgccccaggacacaagggatgttctcaccttcagccacaatgcctctaaggatgggtagaacacgtagatgtatggggccagagaatgcacacctcctttgttgtgaagatttcttctcataaggacagaaactcacatgtgccgagtacacgtgctcaggggactgttgtagttgtttgtgcatacatattatcattttactttatgaagtctgtgaagtaattattaggatccttgattatacctggatgaaaaattgggtgcaaagacatctatagattggaccagaatttcacaggggtcctttgatttggagcctgtggcttcctggtattccattgcagttcagcagcatggctttaagcccacagctcggcatagtggttagagactgaccagcataaatcccagctgtattacttcctggctgacgttggacatgctacttaatctctctgtgcttcagagctctcaactataaaataaataataaaataggaccgttataaattaaatgaattaatacttgtcaaatacttaggacagtgccttgtgattagtaagtgctataaacaagttaaccattattattactataactggaaagggcaccaaagccccagcttcatcaggggaaaataggatattgcccaatggctgggataaaagtaaatacatatataaccacataagtacataaaaaagaaggagacaaagaacattcgatacccaacctcaacagctttttccaagaaaccttccctaaaaaataaaaaaagaaaacctcgaggccgatacatgagaaatgttggcttttaaaaattgtttcccaggcagagataattcctttatttgcatctctcacattctccttctctttccccgcaacttcattaagaaccggcatgaactgaataatactatcctcatcccatgatcatcattattattggcttcttcaaataaagtccatccagggactcttagaggagctttaccatcattaaaatcttcaacctcaaagtttatcctcagctacaactgggataatggaaagatggggatttagtgacatttcttaactgggctaagcaccaaatcctaaattgcagctgtggctacaaccccaaaactttctatggattctctcttttcagggtatgtttgatttataaattcagttcagaagcatatctctactgatcctttacctgtgcaaataactatggggaattaaaaaaatgtttaagatggaaatttgccctttaggaaaagaaagtctaactggaaaaccaagggctggtctcacattaaaaagtagtaaatgattgtcagagtgtggctaggatattggtatggcaccaaaatctctgtcgcacactagctgatatgtgcttgaaataattctatcatagtttcatgtttttaattcaaaattttggccccctcaaaaaccaagtgactacttgtcctgctcaccttagaaatactttcctctgggccaggggttctccaccagcatcagcatcacctggaagctggttagaaaggtgaattagcaggcctttccccaggtctactgaatctgaaactgggagcaggggaccaacaaactcttctatcaactctctcaggtgatttcaagtcatggcaccgtttgagatccactgctctaggaattttacgctaatccaccattcaaaattgaactaaaggcttgtgatggacacagtgtatttttgcccaagcatgtgcattttgaaggagtgagaatccaaagattctgtggctggtaaagaggagacccctgatgtggtttggctctgtgtccccacccaaatctcatttcaatttgtattccccatacccatgtgtcaagggggccgcttagtgggacttgattggatcatgggagtggttttccctatgctgttctcatgatagtgagtgagttttcattagagctgatgcttttagaagaagtacttccccctttgctcgctgacactctctctcctgccaccttgtgaagaaggtgactgcttctccttctgccgtgattgtatgtttcctgaggccttcccagccaggcataactgtgagtcaactaaacctctttgtttataaattacccagtctctggtagtatctttatagcagtgtgagaacagactagtacaacccccaaagtttcaatagcccatcaggtcgaattcatatccttggatggaagattaaatacggttggataaaagattctccaactctcaaagataatctgaggaaagaccagtgttttcttcaaaagcaatgtgaagatgactccaataaatgatcaaatgattcattaaaacttacgtgttctagagcgcacatctggactgcaagaatttagctggaattatgtttaaagtttgcaatacttaaatgcccatctcaataactagggggtgggagtgggcagatgatggcataagaaattttataaggcttttaatttgtatcaccaaaatgctttctagaaatgtgccaaagaataggccagccatataagagtgatataatggactttggggacttggtggaggagaaggttgggagtggggtgaaggataaaagcctacatattgggtacgggtgtccactgcttgggtaacaggtgcgttaaaatttctgcaatcaccactaaagaacgtatccatgtaaccaaaaaccacctgtatcccccaaacgattgcagtttctcaaaaaaataaagaaaggaagaataggctagctatggcatatgagagtacgtatcatcaaccctttcatatctctggggattataaactttttaatatttataaatcatagaagtgagaatggcattatgtagtgtttaacctgcatttctttgattattactgaagttggatatttaaaaatctttattagctttttgtcttcttaaatgtctccttgtatcttttatctatttttaataagctatattttaattgcttagtaaaatgtcatgttatgtaggaaatatactaagatttttctccagttttaagttgtatttattattattattattatttattattattatattcgagatggagcctcactctgtcgcccaggctggagtgcagtggtgcgatctcggctcactgcaaccttgcctcctgggttcaggtgattctctcgcctcagcctcctgagtagctgggattacaggcactctccaccatgcccagctaatttttgtatttttagtagagacggagttttaccatgttggccagactggtctcaaactcctgacctcaagtgatccccctgagtcgacctcccaaagtgctgggattttagacgtgagccactgtgcccagacgtaagttgtattattgttattgttattgttgttgttgttgttattattattattattattatttgagactgagtctggctctgtcatccgggctggagtacagtggcacgatctcagctcactgcaacctctgcctcccaggttcaagtgattctcctgcctcagcctcctgagtagctgggattacaagcatgtgctaccatgcctggctaatttttgtatttttagtagagacagggtttcaccacgttggccaggctggtctcgaactcctgacctcaggtgatccgcctgccttggcctcccaaagtgctgggattacaggcatgagccaccgtgcctggcctgtaagttctattttaatctcttttatttttatatgtacatatacatatatagggctttatagtgtcagttctttttttttttctgtgtggttttattcaatgctttttattttctttaaattttttcaaaccaagatcaggatatgttggcctattttttagtttagcagccttaagaaaattcttgagtggttttatattgtttttacatctatctctttaatgcattacaactgatttcagtgcatggtctgagtaagtctccagctagactttgtttctgaatgaaatagataattttcccaatatattttggtaagaaaatccatcccttatatggccttaggatgctttgctatgaaatgttcaattcgtgtttcttttttaaggccattgtgttcagtgacttgtctgtgaactctagagtccatgcagctttttatgaacactttgttttgtacctagcatttcacagggagcatccacaactctgcttccttttatttttctagtctcaactgttcctttttctagtgaacctggaaattattttgtcaaattgcaaaggaaatctttttgggattggaaatagatattttaaccctatattaagctgaaaaatcatattttcatatattcaatatatataaattatatacaatatttagtagatagatttaaaaattggtttaaaaaatcattacatattattatgtatttataaagtacattttttaaaaaatagaggtttcacaaatttcttgtaaggattattcctggcagtctgttttcctaatgctcatgtaagtataatttttttgttttggttttatttccaattatttctggtatttagaaaactattgatttttaaaatatttatcttcaggccaggtgtggtggtgcacgcctgtaatcccatcactttgggaggtcgaggcagatggatcacgaagtcaagaggttgagaccatcctggtcaacatggtgaaactctatctttactaaaaatacaaacattagctgggcatggtggcgggtgcctgtagtcccagctactcaggaggctgaggcaggagaatcacttgaacctgggaggcggaggttgccctgagccaaggtcacgccactggactccagcctggcaacagagcaagactccgtctcaaaaaaaaaaattatcttcaaacttttttctgtctaagcagatgctcaagtgagtaacaagatgctagtctccccagaggatggacaaacatattcagtttcatgagcagagtggggtagggatggcagatgcacttttgaaaactgcacacccagcgagacttacttcacattccgtggcttaaaagaaggaggatgagatatatgcaggagttagtggtagagccaagtcttcattagtgcctctcagtaaaagcaggaggtggctggtggctctctaaacattgtccttggctttgagccatgaaaacaggaaaaattttgtttgatatcctattatatagcatcacagacagacacaaacttgcatatatacacatttttcataattaatagaagtttcttcattgttctaatagcatgcacacacacggtattccactagacactagattaagaggtttcctcctgctgctgttatctagttctctgaatattatgtaaatttaatcacgacaaaactcaactggatttcctcaactcctccttcctccctcaccttaccacagctaattgaacaagtcccacttactgcttccaaacatgccctgaccctggtgccttttccccattcccctgcagccacccccttgaaagccaccatgctctctctcccaagctgctgcactcctgctcaccggtcctctcaccttctctctcacaccccttccatccatttccacacggcaaacaggaggatcttagaaaatataaaccagattttgtgaatcatcactgaaaacctttcaacaacttcccattggccttagaatgaagtttagactcattgctgtggccactccagcatgtgaggtctggccttcccttgtctgttttgtctcatctggatccactctccttgaaagtctcagccaccaaactccatctacttggcctgtacagttcctcaaacaagatgaactccttgcagcctcagcctttgctttaactgttccctctacctagaatgtgacctattggatcttctcctgacaagcttctttctgacattggaaactcaagttaaagggcacctcgtcaaagaggctgtacccgaccatccccatcgtaaggtgctatttattcaccatattcctttagcctctttccattaactgggtgattattgtcattctctggcttttaaaattctctgtgtgtcatctgtctccttctcagcagaatgcaggcttcctgagggcaggaccttgtccttgactgtctccccagtgcctagaagacagtcttgcatgtaggagggcctcagtaatgctcaatgaatgaatggattcttgatcatttcaagcaagtgatacttctttagtctgaaaactacaatcctcagatcttcttctctcttttggggatttcattaactgttcaccagtggccccattgcctgtcctatttcactcttggttgctgctagaatttgtattatctgacatcgattcagggaaagaggtgctgttgaacagtagtgggatgaaaattgaggataaaggggtggcttcagctgcccccagtacaactctctcagtaaaaagatgactgctggctttctgattgatgggccagacttttggcagaagtggcaacagtgcatgccaacatttttctaccttactcctgcttgccccggcacctttcaaagcctggaaatggaatggccatgaccttgctgagccatgacccttgagggccagttagtgaaaattcttgcacaggttggcatactgctgatgggtacttcttgtttctggtgccaaaaaataacttaatatattgtgactctacaccctttttgtgcttaaatggaagtgtgaccatgaagtttggggaaagttaaggtttcaccacagcgtaaaagcctacaggcattgctggcaatctaacaaaggtgatattgaaatagttttattttaagctcatatcattcaaaatcagctttagagaaatgttttaacgtattccccagtcttttcttcacttagtcaacatgacttctataagtaatgcacaaatagcatgcaaccagtaaataaaatcatagttgaaaattattatcaattatcctcccaagtcaagtgcatttgatgtggacttctgtcttctaatctatgagatgggcataataacaatagtagctaattcaaagatggttgttgaggttgaataaaataatcagtataaaactctggagagaatgtgacacaaaacaagtgctcactgatgtagattgaggttgatactactgttattttctctatcttaaaaatgttggccgggcgcggtggctcacgcctgtaatcccagcactttgggaggccgaggcgggtggatcatgaggtcaggagatcgagaccatcctggctaacaaggtgaaaccccgtctctactaaaaatacaaaaaattagccgggcgcggtggcgggcgcctgtagtcccagctactcgggaggctgaggcaggagaatggcgtgaacccgggaagcggagcttgcagtgagccgagattgcgccactgcagtccgcagtccggcctgggcgacagagcgagactccgtctcaaaaaaaaaaaaaaaaaaaaaaatgttatgtgcaaaatgccagggttcatgagagatgtatttattaaggggaagttgctggggtttttttttaaactacatgtatattatacttgacgttgcctgagcatggctagaggtgggtgcatgtttctgcacacgaatgtgagcaatgaggaacagacagagataccttagggaatggtttagctgacgggtccagcagagcccactgagggcactgcctttgtaggcctccaggaccctgctctaatccatagcagattcatacagtcatacaggtttgattttgttggtccatggagggttgatcaggatctcagggggaaagaagccagaggtagaagacatctaatattttgagtgctgattgcctgcaaagctgtgtgctacacacgttctaatgctatttcatttaaccctaacaacccccatatgccaccttttttgtttgttcgtttgtttgttagaagtggaggaaacttaggttcatagactgttcaaatgacttgtccacggtaacacagtggtaatggcggacagaatcagcatctgaactcaggtaagtatggtttcaaatcctcatcctttctactacactgcacagcctcccttacagactgacatgcactaagcaatttaacttaagagactgggaaataaatcagaaaaacattgcattattttgcaatgatgttttaaacttttccagtgagtgaaatacttaaatctgccattttggatattcagttatgattttaaaaaattacttgagaagtaaaatttctaatcagaagaaaagttacctagtttggagggatcattctgagcttattggattctgcttgaccaacaggcctggccaaatctctctgttttggatgttcctcccatgcaggttagctactgctctgaccagcccaaggtctgaggaaggcagcattgggcaccaaggcacaaacttctttccttgtccttgctccttttcctctgtcgccagtgggtctactctgtgtgcccttttgctgacctgggagcggtaagatctacttgtgttgggacttgcagtagaatggacagaactagtaatttggcctgctctggcctgcggctactttggcctccacttcctccagttggtctagcctgattgaccagacgtccacagaagtgctcggggccagagctccagctaagtaacggtgatgacttgctttgctgtctcctgaccttgctctgttgtggatccctgacagggagagtgaagtgaaatattcctaaatcttaggcaaaataatgacacatgactttaatctcataattgtccccaacattctgtatatgactgccagattccacatttttctctcctggacacagttagataaacactgccaaatccttggttttaagattccctaactaaactccatgtaaaccaacatccttctgcgaaaacacttcattttcagacgaaattacaacattccagtgttcttttacatcagccccaattctgattaaactttgatgagactgcatttcaatggcaatcttgctttcatcggacttcatgatttctccagttttatagccccaaacttgaagaccttctctttctgtgatgtatatctctaaatagctactttatccatttattaggtatcagtcctatattttcaatcacagagcttaatcttatttccaactttggggcacctaaatttagtctatttatgcctgactttgttaagttgatttgttgatgaccactcttctagagacacatggaaaatttgttaacaaacttatttttgaacaggatggttgtactgaatgattacatatggcaggagtctggggaaaatttttacttatctccattctagggacatctactgcaaattccataatagactctcattcctctattatctgagctatttgaattacctcaataaagctgtttcctcctctttcttcactcaggaaatacagagttctcatgactgaacagggaaagtaagaggtttagaaagaataagatggatctgagagttttcaaaatcacttgataacccattattatccaaagactacctacataatcatatactttccatacaaagttaaacttaaaaagtcctttgaggttcaatacctacacacttgaatacaccataatactgaactttagttgttttgagaagacaaaataaaactcattttaaatgtattgaactgaaaaggcagagaaattattccctgaacaagcaggctttctttttaaggctatttttattcctcattgaatgtcaacatgtactatgaggtacatagacatggaaataattctaaatttctgacaggcggggccaatggttcatggttcaggaaagaacgtttagtctggaaatgctctaatttagagaaacttaaaggggaggcaactgaactgaaaatctctaaagtgctgctccattgtggcttgtgctactctcatgtttattcatctgtatacatcaacagccctttggactgagaatttatggtgataaatgttttctcctcctcccctacatccttcttttttcttcttccattcctcttccttctctttcttcttctcttcttcctcttctttttctcttctccttctccttctccctcttcctcttcctcttcctcctcttcctcttcctcctcctcctcctcttattcttcttcctcttcctcttcttcttcttcttcttcttcctcttcttcttcgtgtcctcctcctccccttcctgctccttcttcttcacctctttttgctgcttgggatatagttagtttgagctagataggattataggattgctatcatcatgatattttttgtattaaggataggacatatatggatctaagtaacgtcttcagtcccaagatgtttgaagttttaaaatacatctaaacatctttgcagtgctattagttattttttatgtgataagagttatggtgataggaacataggtttacctggaggaaattatgaaaggtgttaagtacagggaggtttaagttataagaaacatcataaaaacatacacttttcctgggcttgagatgatgtcattttgcccactcccattattctaatgtccactttaaggttattaaaatgtcctaagatcattcaagacagggcagtctacatcttcacttcattatccccaagccctcagagatgccacagctactgagacaaggtcacctaacactttagaatcagaaagttctttaaaagcaaagggctcttctgaaaagagactaaattgcaactgcttcccgtatgtgcccatcaactaatgtgatcacagaactgctttagaaacaacttttatcttagttttttcctcatcaaagattttcaatttagtttttacacattttaatttttcttaaaaaagaatcccccattttataattgaatttaatataaaactaagctttgctaaaatgcacttatataataagagaggacagatataccacgatcccgcaagaaaggtatcatttctggtatcaggagtgaaacaaaaccaacagaccctaagtttttctaatacatatatcaatacccacatgtctatcccaaaactacacttttaattaagcaggtttgtgtatttggttaactggggacttttcaatagttagattggtgcctcctgattgggaaactaagaccagtgatttcccaacaggtattctcccaggctgactgagaaactaatcaactagggctgagaggttattaagtaacatattctaggcttgaaaacccatttctcacaataacagataatgccttgacttcttttttttacataattttctttattaaaatcatagaggttatgtaaaaatggcaataatgctagtaatgtttaagtaacaagagtacctattttgccatcagttatcttggtgaaggaaaggaatacttagctgtgtgatttaaacagttgtatgttaaaataaatatacaatatgccattgggaatgatataactgcaaccacaacacaacacatgcatatactcagattacttaaatcctgagtgtgttgtattcattgcacattatttctttttaaaaaagttattattattatttattattatactttaagttctggggtacatgtgcagaacgtgcaggtttgttacatagatatacacgtgctgtggtggtttgctgcacccatcaacccatcatctacattagatatttctcttaatgctatccctcccctagccccccaccccctggcaggccccagtgtgtgatgttcccttccctgtgtccatgcgttctcattgttcaactcccacttatgagtgagaacatgtggtggttggttttctgttcttgtgttagtttgctgagaatgatggtttccagcttcatccatgtccctacaaaggacataaactcattcttttttatggctgcatagtattccatggtgtatatgtgccacattttctttatctagtctaacattgatgggtatttgggttggttccaagtctttgatattatttctaaattataggatagttatagcccactccttgaatgctgagactacattatattttccaactttaaatatgaaataaatattgaaaataagtgttcatttttgctctaatgaaaacagtataaattttaaaattaggatatcattaagggaagcatctctctccctgaataaactatacaacaaatcataggcccagtattttttctacacatgcagttgagctaataattctgctttaaaacaaataaaaatatgttctaatcatttattatcttagcatcattccaaaaagagatggttgttgatatcagaatatccataaataaagttaaatttgtctcttaaagaggtgttcacctacaaagccttcaaatatcaccagttattcacaagtctttggctgaggaggcttactctgtcattcaatataaattattttcactcaacaagaatgacaagaatggcattcctgcatttgaggtgctttctgtggatgtagaaagacaagatctacgtaagtggaaaaatgtaaaaacaccccatatgctgcaggtagatatataggcaaagtgatttaaaataacagaggcaacattgagaaaatgaaggcttttatttgtttgtttgtttgtttgtttgtttgcttatttgagacagggtctctctctgttgcccaggttggagtgcagtggtgcaatcttggctcactgcaatctccacctcctggggtcaagcgattctcccagctcagcctcctgagtagctgggactgcagagaaagtggatttggtaaaggaaacccagcaagaggtgagcgttttgttttcaaattatgtcaaatttaatttggcgggaaattattagtagttaattgaaaaatttcccaaagacctaaaattcttggccttcattaaatatttaaagaattttaaaatgtgtcccaattttaggaatctcaattagcaaagcttatggtaagaaactcaccctgatgacagagcaattggggacagaaaggctgggcctccttgactccacatggcccatgagatagggggagtgaaggctctgtcgtagagctgggccttcagggtggcagagttgaaggcaggtgtatgtcaagcacaccctggggcttgcctggatcctggcaatttggaagtggcaaggcttcatttggagaagtagaagtaaattgttccagtgcagcataaagttcagagacatatgaggtggggtatccacaaagtggtacccagccctggctcagaccactatcagtgataccacctctgcagatgagtgaggcactgggatactgcactttattaataggtacaagtccacacctatttaatagccctcttcgttgtgactctggtggccactagaaagtttttacataagactgcagagtaaggaaaccttcctgccaccaagaggtgacccagccattactcctcaagccctttgggcatttagggaaagaagaaactgtgccaaggagtgaggctgggaagactcagaggcctgatgaaaaagggtgtgtccaccatgctatggggtctccactttacttgtaagcagtgaagaaccacagaggcagggcgccatcagatcagatgtgaccagatgtcaaatccttctggactttttactcctttctgtgaagtggcttaataaccaaaacaggccaactgaaaaacaaaagggtacccactttgcatgggcctccataaaataaaaggagtttccttctctctctgagtaaggttgtggcctgcaatgggcaaagacaaagtcccagggctaaggagagatgtgcagcttggagaggagaggatcattctgtggttggggagacaggaagtgtggcaaacatggtcacaaaggcgttagcaggctgggccacctagaatgcagctgcgaaactcttccctgtctgtgaggttcagatgcctgcatggccaaacttcacaatcctctgcaaccccaggaacctgcatgggcactggagggagcaggtgcttagtactggcttgtgatttggctgaccaagtgaatgaatgaatgaatgaatgaacacaggatggcttctagagaaaaaagacgagggcaaggacagagggtgtgaagatcctgcaaaggccaatgatgttaagagcccagagctgggtggtggctgagggagtggagaagaggcagaagttttaagagctattttgataggactcgggatattgactgccagtgaggactgagggagacaaatggatcaagaatgacttggaagcttctggccttggcaaatggacactggagtttagggaaggtaagagggagagcaggcttttgagagaggataacaaatttgattttgatcacatgaagcactttatttattacagcattgttttaactcccttataaccaagattatccatatttattgcaaaagcaacagtatcaaagaatgctttaaaatgcaattaaatttgtttaatatagataaactataagtaatgagattgttttcattataatataggtgtcacacatttctcctggtaactaagaaagataaatgggcagataaaacataacagtagaagcatctagaatagtaaattttattactggaagtctctccctagcaatggacaaactcaaccacattcaacacataaggaaaccagggacaagagaggctggcattcttcactctacgaatacttagggcactgactatgtgccaggcacttgctttgtgctagggatataaaagtaaacatacaaggtacccgtacccaaggagctcacagccaagataatggatgagtgtcctgaaagcagaaattatcacacagcttaataattattgtgagaaatgcatgctcaagatgcaaggtgcaactcatccaggcttgggagcaactcttgtgaatgagctgacctggaaggagatgcagaagtcagacagagaggttatgaagcagtgttctaggaaggccaaagtgcgggcaagcccagtgcatttaatgaccaaaggagtgacagtacgagggaactctagtcctgggtttaggagacaatagtctcctgactccctgttcagtgctattttagaatactgcctgtgtattgacaagtctgtgaagattcagcacatacatcaatactcttgcatagaaaaaaaagaagcttacatggctcgtgctatgccagtgtagacattaggattctctaaactgccttgctcaaaatgtttctttagaggaataattacttcctattttagcttttcatttccttctaaatgtttatatcaattgggccatgccataaaattcttaagtctggaagggatttaagttatcatttttttggcaaccaagggagtgcagggacagggtggagtagggctcagtgggagcaatgccaaccctggtgcagcaataaagggggcattctctgcagggaatttaagaattaataataaaattgaccaaaatcactctgctttttattatcactaattctgaataatgtcaacaataaatacttgctgccaaggcaaacttctcttactgacccttccctatgtgcatggcactgcattatgtgtatacccgtgcatgcagaaaaccagccctgaacaggcattagaaatacccaaagtgtccatattagccatctagtcagttcatatggccacaccctcgccattcaattttcttctgtaaacagagcttgagtagtcaaaatcagacacatcaaaaccccacatcaatgtgcatcttcctaaaattatatttctctccaattagcattcacatcttgactagtctcatatccatctccagctggggccgcagggggctgacatccgatgctgccgcttccctatgcacaggctcaccaggagcagtcttcgctcatcttctccagttgggccatctggcacgtgcttggaggggtaaacaccgaggggtctttaatacccagctggatgtcaaaaaaccgcgtagacaatatcacactgtagtttatggtaaaggtttcctggacaggatagcaatccttgactgtatagatgccaatccaggtttcatctataagaggaaaaaagttgacttttaaataaagaagacaggcaagaagttcatattttttcttatggtggtaaaatgtacataacataaaatttaccattttaccatttttaagtgtttggtggccttgagtacattcacatttgttgaccatcagcaccatccatctccagaacttttttcatcttcccaaactgaaactctgtctccattaaacacgaacttcccattcctcctctcccagctcctggaactcatcattcgattttctgtctctatgaatttgacgactctacatacctcatgtaagtgggattgtactgtatttgtcattttctgcctgcattgtttctcttaacattatgtcctcaaggtttactcaggctgtagcatgtgctggtgtttccttcctttttaaggctgaataatattctgttgtatgactataccagattttgtttatccatttatctgttgatgaacatttgggtttccaccttttggcaattgtgaataatgctgctgtggacatgggtgtacaaatatctgtttgagtctctgcgttcaattctttggggcatatatatatatacagaagtggagttgctgggtcatatggcagtcttatctttaattttttgagaaatcaccatactgtgttccacagcatgaatgcctgtgtggtaaaaactgtcttgggataggcgtatatcagcagcagggcagagaatggcttcacataaaagtaggctggtttgcacactcagcatgatgggagtagatttgacccctgcaactttaggaagtgggggaaagaaaaggaggcacccaattcaaatgtgtgccttagacagatgccttccatgtcacagacctcgggacgaccataaaatgtcaaaatcaaggctaagttcacaggagccaaagtggcagagaggtgcaggtggcactagaaggctgaggtgtttcaaatatgaagcttagatcccgttgccacatagtgagcaaagtaacctgcagacctaagtggaggctttaaaaaatttttgattaagcggatgtttccctaaaaactaccttccttaaaggacttaaacctttttccccatcatgcatgctgaatacaatgcttagattctttgaacccttacaggatctagctgactttctgtccgaccactcctggacggtgatctgctcctgaggccccccgatggagtactggtcttcaaaggtggagttttgaggaatgtcaagaggatcccagggctgtgtcagggtcatctttgagcactgcttggtggcttggtcaatctgaaacatcactccatccttatacagcaaaatatattcaaataatctgaaacacagatggaaagaagtagtttgggacttcatgttaccatcctcgtgccttttaacagcacaaacacctttgatagatattacttttaaaatagaaagaaattactagctaggcaatcacttaacgtttataaacactaggcacatgaaacaacctgcatatgaaataattagaattcacaggtcagaccgagcatgatggctcatccctgtaatcccagcactttgggaggccgaggatggagtacgttttgagcccaggagtttgagaccggcctgggcaacatagtgagacccctgtctctagaaaaaaaattttaaaaattagccagacatggcagtgcacagctgtagtcccagctacttgggaggttgaagtaagaggatcacttgagcctgggagttcaaagcttcagtgagccatgatcatgccaccgcactacatacagcctgggtgagatcccgtccaccatcaaaaaaaaaaaaaaaaaattgaggtcaaaagtgtatattcactgggcaaattttgaccaaggacctagtatatgccagaccctgtgcttagcatacaaacatggggaagatatggctccggctgaagagctggtttgtgaacttttgtttacccacagagacacaggaggacttgactcttgtgtggtgcattttctctcacagcactcagtcaaggaattatgggggtatactgaacataggacaagaacacactgaggactggatggaccgagtgcctgtgcttcactgcctccactgccgagcagtcatgagtaaggggctttgatgcgcatagctgatccggcacgggcgcagcccacataccctgcagtggctgagatgagagcaaagacaaaagctgaggcgaccccagagcaaatgactcccttagctgagtttctctccatgctctcagcctcctcccgtgaccacctgctcacccttcctggggagtgacagggagatattcagaggctgagcccaggagtcaccagccatgcagtattggcatcagtcctgtatcttccttaaagctgagacatcttggtgttgggggaagcctgctgtgtttctatgcatttcactgtcaatctaaaactcaggccacagctgctggtcaagaaaatgtgtcttgcagccatgacctcagaaagtgaaatctgcaacacttgagggctgaagagcctagagaagtgacttgtcatcagcaaataaaaatagccaacaaattatctgtggcttatgagacccaatgcactagaggagacttcagggaagacatttgctctccagcccaagcccgagcttaaaaactattttcttcggaaaaaaatgttagaaatggttactgtctttatagtcaaaacacagtcgtgcgtcacttcatgataggcttatgttctgagaaatgtgtcattaggctatttcatcactgcacgaacatcatagagtgcagttacacaaatctggatggtacagcctactacacaacagggctacacagtatggcctactgctcccagggtacaaacctgtactgcatgtgactgcactaaatactggaggcaactgtaacacaatggtaagcatttatgtatctaaacatagaaaaggtgcagtaaaaatatgggataaaatataaaaaatggtacgcatgtatagggtacttgccatgaatggagcctgcaggactcgaagttgctctgggtaggtgagtgagtgagtgagtggtgacagaatgtgaaggcctaggacatttctatacacttctgtaggctttataaacattgtacacttaggctacactaaatttataaaaactatgttcctttcttcaataatacattaattttagcttcctgtaactttttaactttatatacattttgattttttaaactttttgactcttttgtagtaagacagcttaaaacacaaattgcacagctatacaaaaatattttctttatgtccttatttgatatgcttttttctattttaaaatttattttattaaaaaaaaaactttgtgttaaaaattacaacacaaacacagatattagccaggcctacacaaggttaggatcataagtatcaccctctttcactcccacatcttgtcccactggaaggctgtcagggccagtaacatgcatggagctgtcacctcctataataacaatgttttcttctggatacctcctgaaggacctgcctgaggcagtttcacagttaccttttatgtaagtgggagcacactctaaaataacgataaaagtataatatagtaattacatacatgtggccaacaaacataggaaaaaaagcccaacatcactgatcattagaaaaatgcacatcaaaaacacaaaaagacaccatctcatgccagtcagaatggctattaataaaaagtcagaaaacaacagatgctggcgaggttgtggagaaaaaggaacacttttacactgttgatgggagtataaattagttcaaccattgtggaagacagcgtggcaattcctcaaagacctagaaccagaaataccatcaacccaccaatcccattactgtgtatataccccaaggaatataaatcattctattctaaagatacatgcatacctgtgttcattgcagcactattcacaatagcaaagacgtggaatcaacctaaatgccatcaatgatagactgaaaatgtggataaagaaaatggggtacatatacacaatggaatactatgcagccataaaaaggaacaagatcatgtcctttgcagggacatggatggagttggaagccattatcctcagcaaattaacacagaaacggaaaagcaaatactgcatgttctcacttataagcgggagctgaatgatgagaacaaatggacgcgtcggggaagcaacacacactggggcctgttggtggagcttgggggagggggagcatcagtaagaatagctaatggatgctgggcttaatacctaggtgatgggatgatccgtgcagcaagataccatggcacacgttcacttgtgtaacaaatctgcacatcctgcacatgtacccctgacttagaataaaagttgaagaaaaaaaagtataatacagtaattacttatatgctagaattgtgtacaactgacagcacagtaagtttgtttacaccaccaccaccccagacatgtgagtaatgcactgcgctaccacatactatggctatgaggtcactaggcaatggaagtttttcagctccattgtaatctcatgggaccaccacttcattgactgaaacgtcattatgaagcacatcattgtattattagtagccgtatgcttcaggtttctatgaggtagtatggaaatataaacatgacatcattttacacctttatgtgtatcttgtttatttcagaaaagatttgaaacggcttacaagggtaaaaataacccagacacatacctttagaaatgagaatgaatatagaaagaaatataagtgtgcattttatgagatattgctcaaaaatggagctaattttttataatatgcatgcagggtcaacgtaaaactgttagccctttgaaaaagtttgggtttggattgtcactgttttctcataaccagctaaatctctgacacaatagagcctaagcactgattgaagaaacacagcaacattaacccaactcttagagcattgttcatttgtaaatatgggaattgttgtccatacacaaatcctgtcctgtgatacttttaatgacccgtgggccacccaaaaaacaagttgtcttcattgttctcctcaccaccagcaatatcttgtgctttccccagtgctagatatctgggctagaaaggcattcctagcttttgctgatatccctgttgtgtgcttctcagactgcaatagttgttccctggagaatatgtagccatgtgcaggagagggggtttccttcttgaaatcatcgccatcactccccaaatccacaggatcacagaagtgtcattaatatggtttggctgtgtccccacctaaatctcatcttgaattgtagctcccataattctcatgtgtcatgggagggacctggggggaggtaattgaataatgggcacggttctttcccatgcttttcttctggtagtgaataagtctcacaaggtctgatggttttataaatgggaattcccctgcataagctctctcttgcctgccaccacgtaagaagtccctttgctcttccttcttctgccactgtgagtccattaagcctctttcctttataaattacccagtctcaggtatgtctttattagcagcatgagaacagactaatacagtcctcctagcctcatatttgtcatacatgtcattctagcctcatatttaccttcctcaccagagtttactagaccagagaggagacaatgagattctttcatctcgacctgtgtcatggcaaccgaggtctaatagtcagcctcttatgtggctggacataccacatgtaaatttcgaagctgagggaggctattttccaaaacgcaaatggaataggattaaagaatgaagcagagagaagcactagcaaactgggattccaacagctgttcatttcctgggctctttttttctgagatgcttggagcacccccgcttacagagttacaataagcttcctttgttctaataaactttccttcatttttggcttgcagctttttatgctactcagttctatcatttctgttagaattgaggactccagtgctccatggagagacccggggagcagctgccagcacagctgtgctgggaaaggcccagcatggccctgtgtggcatcaagggccacagatgcctggtcagtcacctgcaacagaagggcaggggacagcagggagggaacactcacagcttcactgtttccctgaggcccgctctgcccacatacagaagtaaaatttaattttaaaatgagaattttagacccggaacaatcactatgaaatgttaacatttgctaaatctgggtggtctgaacacaagtgttcgttttggtgttctctgtacttttctatgttttcaaaatatttgcttttttaaaagtagacatcatctgatattgaggttatgttgactgtacctcaagttaaactgaaaataataaattaatggaaaacaaaatagaactatataatttgttttcaaaatcccatgtggatataaatgctagtactgctctatgacaaattttagaaaacattttaatgatactgtagtggcgtgtgtgtttatgtgaacatattaacagttaggacataagtctctgcatcacaaatagaatacagggcctgtggcctgacagggaccaaaggtcaaaatgcaaagatcagccacggttgagatgagtaatcagagtggggatgctgtacgggaataacccgtggacccaagggattaacagactttgagaggaattggattcctggaggcgagatcaaagactggctctgtcacagaggcaattgtgagatgagaggcaccaacgcccccgctggggcacagtcaagcaaggtgagatgctggaattggtgttcaggacagggaggcagaccagcccaggtcaacaacagcagacaaacttcgcctccttgctggccaggcaccaagcaaagcatagttcactgggaggggcaggcgagttcccacaaaggccctgctgctgctgagcctcagctgtgagcaaggtcaggttggctaggccctgccaaaggctcagaaggccaagctctccacggcaaccacaacacacaggacgggccagcggcctgttttgcttctcaccatatgggacaaaggatttttgttgcttttactaaaattctcaggttacattgacaatttccattgtttcctgcaaatccatttccctaaaaagtaggctctcgaatcaccatgttttctgaaacaccgaaaatctggggaagttttcttgcttttgaaaatagtttttttttagtaaaacagattcatgatcaatataaaaaaattaagcaatctagggatggaaagggaagcaaaaattgccaagaaactctaatttacagaaataacaactctgtacatgtgtctggacatatattcttctaaatatgtctttatgtacgtattaatttttatatctaaatttttatgttttaattgtggcaagatacatgtgacaaaaatgtaccatcttagccatttttaagtgtacagttcagtaatgttaaatatattcacattgtggtacatcagtctccagaactcttgcaaaattgaaactctatatccattaaacaataataacccattcctccctctccccaactcctggcaaccaccattctatgagtttggctactctacatagctcatgtaagtggaatcacacaatatttattcttttcagtcaatataatatcttcaaagtttatctgcgctgtagcatgtgttggcatttccttcctttttaaggctgaataacatcccactgtatgtatacaccatattttatttatccattcatccactgatggattcctaggtgtttcctaacttttggctattgtgaaaaatgctgctataaacataggtgtacaaacattggattgatttttcaatatgtactatactcattttacgcaaatgagtgcctatcatttatttgttttctaactatgcattttaaattcaacaatttgcccttgataatcttttaagtaaaaagataaatctaatttttctaatttttattataaaatattttaaatatgcagaacagttggagaactagtataatgaccacttttatgtctgcctcctaggctcaacaattctctacattttactgtattttttctagttttctaaatacttccttaaaacaagagcttctgccacatggtcacaataggactgtatcttagaaataaaaattcattccctgatatctgctccatattcaagtggccccccaaatacatcttaaagctggtttttcaaatcagagttcaattaaagttcaagcattatatttggttatgtctctatcaaaaatctggagcagtactcctacctttttattttccaacatgacattgactctttgaagagttcaggtttgcagatattccacaatgtggatttctttggcagtttcctcatggtggcatttaaattgctatttgagcgtttgtcattcttatgaaatggatatgaagtctaaaggctcttttcgatttgagttccaagatgtttgtaaataacatgtcattggtgaggttgtatactttggactttatcatatctgaagacaggtgatgtaccttcccactattaatgctgctaactttgatcaccaagttatatggtgactccagatatctgttataaaagtgtttccttttgcaattggcaagtaattgatgagtgatactttgtgatgttggaaatgtcctgttacccaataactgtcacctaatggttttaggcaaatccgtttcctgaatcaattatttcactgggagttaggatcatagtaccaatggtatagtaaatgacatccatctatcttagtctattgagtaccactctggactcatggatttattatttattcaatgtatgacaaacaattaaagtcattattccttttgatgctaaaatttacccaagtttggccagagggagctccttcaagttggtacatgtatcttctgacataatcctattagtctctgagtgcttcccgatgttctacgacacaaggtggcacaggctaaccttggactttccctgtcccagatctgaaatcaggcatttctctaaaaaactctagttacccttagtggggaaacaacttagaaactgacatcagggcactagatgggctcattgccattgagatgacattgctttgaatgcttttcaagtggtcagagcttccaattagaaaaaaaaaactcgaattcatatagatattttccatttaaattaacattacaggttttcccccctattttttgtatatcttttatatatctttcctcttaaaataaaaatcatgcttcctaaaaacattaacaaaaacatttatttgctttattctatgattttgaaataataacttcaaaactattataaataacaaaattgccaagtgaagtttaagatttcattgtagttcctcttatccttagaatataattccctagtatcgagagtcagtattgtgtcaaaaatttacttagaataagcctattctctgtgtggttatgtttccagattgatagatcattaggttcctttgttttagtttgttcccaattcagggactttacacttttcctctctgattttattatttaaatatgtaaaaattttcatatttcaaaactcaaaatgacagaaaatggtacgttgaggcaagttccccttccatccctatctcctcttccctattcctcatgctccttatagataacacttttcaactgcttccattttatttttcctgcatgcctgtcaaaaaataagcaactacatatgtgaattattattttctcttcttctttacagaaagagtagcatgccatatagacctttctgcatcttgctttctccattctccactaatgcctacagactatccctattttttcatggccatgtaaatttactgtgtgcaaatatcattatttctttagccagtcttctaccaataaacattgagttgtttctattcctttgatattaacaaaaataatgaccttgtgttgtgctgttttggagttgtatgtttagggtaaattattagatgtggaattaccaggtcaaaaggtaaaagcatttgtggttttgttaaatattaccagatttctctccacagggttgtactattttgcatgcctatcagcaatatattatagtgccttttttctttatagtcctgccaacagagcatgttgtcaaacttaaatttgtgctaatctgaggaataagaaatggtatctgactactaggtttttgttaagaatatttttagtaagtataacatccataagaggggtctttaaaaagttcacggaaaatgtgtattatgaaaaaactatgcatggattccaacttttttcaccaaaacaaactcacaaaacttgttataacatgcctaaacaggatctagtttgaggcaccaagaagaataagacatcagtttgggtagagctcctatcagagcaacatgcattctgctaaaattaaagcaagaacaaatattaaatttattataaggctcaagtggcagaatggtgaaatcactgatgttttacaaaaagtctatgtgacattgcttgaaagaagtcagcagttacaaataaataactcattttaaaaaggtaggagtcaatattaagattaagatttaagatttaagcccacagtggcagttcatccacatcaatttgtgagaaaaaaaaatcttgggccaggcatggtggctcatgtctgtaataccagcactttgggaggccgaggcaggcagatcatgaggtcaggagatcgagaccatcctggctaacatggtgaaaccccgtctctactaaaaatacaaaaaaattagccgggtgtggtggtgggcgcctgtatttccagctactcttgagtctgaggcaggagaatggtgtgaactcaggaggcagagcttgcagtgagctaagatcccgtcactgcactccagcctgggcaacagagtgagactccatctcaaaaaaaaaaaaaattggtcatgccctaattgtacaggagacaattgtataggacaattgtacagacaattaacaggagaaacaatagccagcaccacagatagctcaattagttcagcttatacaattctgaatgaaaaatttcagttgagcagacttttcactcccaagggtactgaaacaattgtggcggcccaatcagctgcagagaagagcagacccttcaatggaaattttacacaagtggtcaagatcctgaagcatttcttttacgaattgtaacatgagctgaaacatggctttaccgctacaatcctgaagacaaagcacaatcaaagcaatggctaccaagtggtagaagtggtccagttaaagcaaaagcaggctggataagaacagaagtcatggtaagtttctctggatgctcaaggcattttgcatgttcgccttctgaaaagccaaagaatgataacatcttcttattatgagagtgtttgagaaagttagccaaagctttagcagaaaaatgtccacagaagcttcaccagagcttctccaccatatcaatgtttctgctcattcctctcatcaaacaaggacaattccatgagatttttgatgggaaatcattaatcatccacttgacagtcctgatttggctccctctgacttctttttgtttcctaatctttaaaaatatttaaaggcactgggtgtggtggctcaagcctgtaatcccagcactttgggaggtcatggcaggcggatcacaaggtaaggagatggagaccatcctggctaacatggtgaaaccccatctccactaaaaatacaaaaaattagccaggcatggtggctgacacctgtagtcccagctacttgggaggctgaggcaagagaatggcatgaacccgggaagcagagtttgcagtgagctgagactgcaccactgcattctagcctgggcggcagagaaaggctccatctcaaaaaaaaaaaaaaaaaaaaaaatttaaagggcacccatttttcttcagttaatatgtaaaaaagactgcattgacatggttaaattcccaggacctcactttgttaaggatggactaaatgactgttattatcatttacaaagctgtattgaagttgatggggcttctgtcaagaaatgtttatattttttattcatatcttttaattctattttcctatgaacttgcaaaagtccccttgtacaatagattgcatagatttaaggtgtggaacttgagaaactttttaggtgaacaatctgagtatctccagcacagatcaaagataaggcacctcagaagcctccattgtgccccctcagtcactaacctttcaaagagcagtgtaattttaattcacctcctttcataatagttggtggagtgttcatatattaagcatcatctgattttatttttccatgaactgactgttcatttctctgcacatcagaatttttttctcttctctattttctatagatcattaattaattagcgttttgtacttgatataaatttcccctgccatttgttggttttatttaaatgttttctacaatgcaaaggctttttcatttttaaaagcaaattccttttattgtttctgggttttgtcatatttaaaaaaagcttcctactctcagattataaaggaatgcatcatgttttctatcataactgtgtggttttattttgtttgttagatctttagtttggtttgcagtttatttttatgtacggtgtgagatgtggattcagtttcatcttttctcagttgttccaacaacactgattaataagtccatcttttccccagtgatttgagatgccacccttatcacatacctaatttccagatgtatgtggatctatttcaagactctattttattccactgaattgcctatttacacatcaatgtcacactttttaattacagagacttactagtgtgtttcaacatttggtcaaatttactagtcctcctcttgtgtccttcttttccaacgttttcctatgtttgggctttttaatttttccatatgaaatttagcatcaacttagctaaaataaatcctgcttttttgcatttattggaattcagttaaatctaggagaactgatatctttatgatgttgaatcatcctatcactccaaaaaaggggtgtttaaattttttcctatacaaggtttgcacatttcctttaaatttgtttctaagtagttgatcttttgttgtcactgttgctgttttaaatgacactttctcttacactatcattctagcaaggttattgtttgtatatatgaagactattgatttttcatgttaattttacatatagccaccttacttttattgtctgaattagttttatgttcaggtcttttgtgtcttccaggaatactatatccatatcattgatagagatggttttcaatttcttcttttctaatcccttaccactaattactttgtcttctctgtctatactggtcagtaaattcagcacaatattaaatagaatgtaggtaatgggcatccttgccttcttcctgagtttagcagaaaaagggctgtggtttcaagtaaattaagaactacacaggttgtgctatgttaaagaagcatccatcagttcctactgaatccattgtattatgaatgtttgttgaatgttatcaactgcctttctgccagactaaggctataatcacatgattattttatagatatttatggattttctaaaattgaaccatctttgcattcctggaataaatctcacttgattacaatgtatttttttaatgtgctgttggacttagtctgctattaaggaacttttaatcacttattatatcaatattcataagtgagaatgaattacaataattttaacagattcacatttcccttgtgtatatatatatatatatatatatatatatatatatatatatatatatgccatgatttgctagttcccaaatcatgtccgtttagattatttctacagttttgttaatattaatgatgctgaatatgaattggagataaaaccttttacctttctgtgtttatatcccagcaaaaaaatttatagaatgggatcattggatcaaatgaaattcccatctcatattttatgagatactactaactgtcccacctccccacccctacccaacaaaaacactggaattttgaactagatgtagagcttcattaatttctctgcattagaaaagatactaaaagtttaccctactagaagcagggaaaaaaaactttctagttttcttaatttggcataaggtttacagacaacgtaaaaggttaaaaagcttaggtcaaagaatcaagcttcctcatttgctattgatgagctgtatgataataaatgtcatctctctacttctcatatggagagaccaaaaatttgaaacttatgacattcttatgaacagaatttgagataatagatataaaattgttatataaatgtaaggtatcataaccatggcaggaaaatctcatatttgtgtttatcatcatcagttaacgtttaacagggaaacaaatcattttacatgtacacatatgaattgctctactacgtaacaaagaagggctaattcatccaggtgggatagagagatgaaggacagaacatctgagtgctatggtggatcccttactaaaagacccagcaggcatttgtaccccttctcccttgtctgtctctcaatatagaggttgagaaaatcacactgattagtccctctacctccatggaagattggagccctgtagataccaaaattcacagatgctcaagtcccttagataaaatggtttagtatttgcatataacctatgcatattctcctgtatactataaattatttctagattatttataatctttatacaatgtaaatgctatataaatagtggttacactctatatttttgatttgtattatttttattgtcatagttaactttttttttaaagacaaagtgtcactctgtcacccaggctggagtgcaatggcattatttttgcttactgcaaccattgcctctcaggctcaagcaatcttcctgccccagcctcccaagcagctgggaccacaggcacatgccaccatacctggacattttatgtatttttttgtagagatggggttttgtcatattacccagggtggtctcaaactcctggcctcaagtgatcctctcacatcagcccctcagaatgctggtattacaggcatgaaccaccatacctggccatttttaattttttaaaagaatattttccatctgtagttggtggaatccatggatatggaatccatggatgcagagggctgactgtactcatattcttagtctcccttagagctaaaggtatctggttctggctttgaagatctaaaggaaagtttgtaatgagagataatcctctggagattcctcctttttctcaaaggaaaaagaaaaaaaaaaagaggagagtccttgttctagggaagctactcccttcactttctgtctttgactgtagttgggagaggatataatgctaggagcagaggcagccatcttgaagccatgaggcaacaagtcaacatgcaatcttggaactacgagccatcatgctaagaatggcagagtaggtcgggcgtggtggctcacgcctgtaatcccagcactttgggaggccaaggcaggtggatcaggaggtcaggagatcgagaccatcctggctaacacagtgaaactccgtctctactaaaaatacaaaaaattagccaggcgtggtggtgggcacctatagtcccagctgctggggaggctgaggcaggagaatggcgtgaacccgggaagtggagcttgtagtgagctgagatcacgccactgcactccagcctaggtgacagagcgagactccgtctcaaaaaaaaaaaaaaaaaagaatggcagaataagtggatgcagataagcctggggtcttgatgaaactgttgaatcagacctaggaacatgtatcccaagaattctggagtaaacaacgaatattcttatattttagcatttgctagtcagattttctgacacttatagctgtaaatatccttaatgaaatgaataaaaaccactcctttatggataacatctactcaattcattacaaaatctctatgagagccttccctctcagaatgagcagggcccaaatatttgactaatcctagaaccccaaataccggagcttggcctgggtataggtgaacctgagcagctactgccttaacagtcaagagacaagtgtttttctgtcacaatttggagtagtcaggaaaaaaagaacacatccaaagcagaggttacagactggcaaattcagctggttgaacatgttattagcatttttatttttttaacagatgagaaaatatgaggctcacagcataacttcgtagttaagtacgggatcaaccagactcattctaactcttaaacaccatgtgccttctcgctctcaacagggggaaggagtgattcttcccatccatgtagaactgctcagccatccaagatatattaaattacagaaaagggagtagacaaatattatattgtgattacaaaaggactttggcttttatggaaaaaattgaacaaactttggatttgtttaatacgcactataatagattagtaatgcatgccggccatctgactctcaagaggaagaattgagccgcggccacttgccatgctggcgtatactaagtttgagttacaccctgcaatgattatgagacataaaaaagaaaaaacactatttcaaaattgtgttagatacaaactcattgtgcgcattgttgccaatcacatataacaaaaggaaaattaaattacttaagaatgcagcctgaggaaaagcaaaatcaaagaataattatgtttgccatttaagaagctgtaaggtgatgggcctccatgacttggattccagttcaaaagatgaaaaaagtgcttgagaaattgaagagctttttttcccaaaatatatctggatgaatattggcaatgtgtaggcaaatactctttcatctgatgaaagataataaaaaatttctcatgagacagtagtgcaggctgagttttgtttcaccaccacaaaaagaaatagcatcattagtactgagatatccaggttgccatggtgctcagtggcttctaaaacgacatagcaggggatgtcctctaagaaggatgggaaggacagtgcagggtcagcatgatgccatttagcagaaatagatcaattcccaccatgttgaaatataaactcacgcaaacccttccagctaacatttaatgaaactctgaaatataaatcttattttttattttcactgggatttgggatagactgtgtttacaattgaaaaggaataatgtgtgaccacaaggatagctttctgatgaaaaatatcattatcaaaataaaaaatagtagcaagggcctgtggtcccagatacttgggaggccgaggtaagcaggccacttgagcccaggagtttgaggccagcttgggcaacatagtgagatgtcatctctaaataaatgagtaaataaattttaaaaatttagaaattaaaaatgcagtcatggctttgtaaagcagattgactatggcaaaaacaacaacaacaacaaaaaccacctcacaggcagtgacttagagggtattattgtagaattcagaggggaaaaaaacatattaagtgatgaaaaggctaaagcaaagaagacatttggaagacagatgtaatgtaagagaaccagaacagataagcagaaagagattctgtaaggaaccaacaaaaaagcagagtatcaaacctccagaaatactagaggaaagttcccgaccgggcgcggtggctcacgcgtgtaatcccagcactttgggaggccaaggtgggcagatcacgaggtcaggagatcgagaccatcctggctaacacagtgaaaccctttctctactacaaaaaataaataaataaataaattaggcgggtgcagtggtgtgcacctgtagtcccagctactcgggaggctaaggcaggagaatcacttgaacccaggaggtggaggttgcagtgagccgagattgtgccacttcactccagcctgggtgacaatgtgagactctgtctcaaaaaacaaaaacaaaaacaaaacaaagtgaaacaaaaacaaagttcccctaaaactacaccttacctggagatgttaataaaattcaaggataatagaaacaacctacaaaaacatgggcagaaaaaaaattattgaaacgaaaccaaatttagtttggtgtcagacttctcttttttttattttttttatttatttatttttttatggagtcttgctctatcacccaggctgaagtgcagtggcgcaatctcaggtcactgcagcctctgcctcccaggttccagcaattctcctgcctcagcctcctgggtagctgggattacaggcgcatgccaccatgcctggctaatttttgtatttttagtagagatggggtttcaccatggtggccaggctggtctcaaactcctgacctcaggtgatccacccgcctcggcctcccaaagtgctgggattacaagcgtgagccaccgcacctggcctcagacttctctttgagagctgtaaatgccataaacatatttaagcaaaaagactatttttacccaaattgtatacaccaaaaaaaatcattatttaaatggcaataagtagatgtgcttagacattgaaaatctctgaaagtatgcaaccttagtgtcttctctgaaaaaaaaaattgaataatttctctagctgactaaaacatgaattgaaataaaggtaaatacgaaaattagtataaaataaattgcagtgaactatgaaaggagtaaaatggcttgtttctctaaaacagaagaccttgtgacaaagctccttataaacttatgcaaacacacacactataaaaattcctctgtgttttaacaactgcagaaattgacctttttgaggcttgattcagcatgatgaaagaggactacaaaccaccaaaacacttcaaattcttttcaatatactaagtggaacctaaataaatacttgtcctgtgcaaaaggaactgtgttctgatgtccgagaagtggattcccaagcttcatttcctaactccttaaggagagttgagacctcagaagggtgagatctctggggtccaagggtaagccaggccgtgcctgaagctgggctaggatgagaatttctattcaaaaggacagggtgtgtgacaagggacaggtggagggcttgactgtgagaagaagaactcccacacctacaggaaacacaatccatgccaagatacagcacctgatgtggcatttccaatggatatgaagtctggggcagattctcttcccccatccttcactcccaagagtgcctgctggtactcagatactcctcataagttatatgttacctattgctgacaatgctgcgtcaggcagagctgtgcccttggccctgcaccaccggcttcccatctgccactgtcttccctggtggcttctgagatgctctggagcagcgtcttccctgagagagctggggctgtgactctggtgcctcttccaaggtgagcttttggctgtcactcatcggcagggcccacattctagaactctaccagaagatctaactttaagccacaacaaaagcagccttctgtgagcgggcaggagtcatccaaggcatgtatatccttttcctccaggagaagttgccttctttaggggagccatcatcccaagagtttctcctttctttggggggactgagggtaacttaggcaccctgctaaggatctgattcctcttcagatggcctcccgactcaaaaaggcactgcttctgagaaactgtgggtgctttagaaataaatctcaaatgcccacattgggtgaaattccccaaaattgaaattgaggcacaagagagacactgaagacagtgtttgatgagagggcagtgggggagtggctcatgggcgaaaggagtttggggcatccactctctggaggtggtggtgtgccctccacttcaaccctactggaaaacttttcaaaacactgcagtgtaattcgatgtcaaaaatcattcttaacagaaaagaggtataacgtaacatataaatgaaaaaccatgaaaccattacataaatctatcattttattgtctaagaaatttaattataaggaaaaaaggaaagaaaatacatatctattatttaggtatccttctacaatgaatgtatattatcagttattcatttccctcattcactgattcaaaaaaaaataaaaattagtcaggccctgctcttagcagttagaaaatggagcttgggaatcgccttctccgacatcagaacacagctcttttcatatgggacaagtattcgtttaggtcccacatagtatgttgaaaagaatgtaaagtgttctgaggagttagagacacagcaacaaccatacaaaacccctggccttacggagccttattgtgcatgagggaaggtgggggagatgaaggaacaaactttaacgttaaacactctgccagatagtcataagtgccttggatatattaatataaagcagtgagggggcactgagaatgttgagcagagaaacagttcaatttgggagtaagtcatgcagcttcttaggaaaaagtctttctaggcagagggaatgacagattcaagtgccaatggggtcagcgtgctgaggccaggtccacaatgagtgagctggtgacagagataaggtagggaaaaggctggggagcagatcctgagccaagaagtggcatgacgtattttcaagagaacccctggggtttctatgtggagaacagactaaagggagcaaggtccgaagtggggacaactgttaggaggctatcataaacatccagccgagacataataaaagtttgggccagaataacagtagaggtatggtcagattcagtatatatcaaaattagggtataggtaggaacataaagagatgagagcctgagccctgggagagtccactattagcagtccagagaagagcagaaagagcaaaaaggcttgaggagaggaaataaggtgggagaaggaaaaccagaagactagcatgttgaaagccaagtgaagacagtgcatcaagattggggaattaatctacaataagatgaggactgatcaaagattggttgattagtaatgtagagcttcttgcttttgaccagagtattttcaatagaatggtgacaaaagtgattggagggtgttcaagagagcatgggagtacaaaaattgtagttagcatgagatttgctttaaatagaagaggagaatgagatttcagctggtaagatcaagagaagttttttttttttatttaaagatgggtaaaataaaagaaaatgttaagggggaaaatagaaattttttactggaattggtgaaatctaagactatcatatttattccaggaaaaacaaaccactaattggtggaatattttcagatctttgggcactttgcccctgaccaccatcctcaaggtcagaatcaggaagaaacagctcaaggttattggagaaagtaaagatgttttcaaagcagtatagtgaccacctctggcttccattcgtaaatttgtcttacattccatcagcctccttactctcctgggcttatcttctttggatcttttttccccagtgcctgcttctccctccccatctcagcattaattgtctgaaatccagggtctatagacacactgaattaagtcccttaaatcaaactttgtgtgcttccaagaaaatctgtttcttgaagaaaaactcaaatattgcgaaactcaagtattgcaaatcagtatggtttattctttgaggatcaggaggccacaagcagtcaagacttcctcagctcacaaaagaatatgctatctccagccatctgagaccaaaatgatggagtaaaggtcaaaggagaagtcatgctcttaatattcacaaagtcgtgatttcttaaaatgaaaatccaatccatgcaagacaagattcatgatcaaatagatttattgagcactttatattagtctgcctcccccagtcacacagaaacaccctctgaggatttgtaatgatgacatactgagaatccaaaagcaatacaaacatatgttaagaacataatttcatctactcctttctcttgaacaatttagactaaagccactaggtaggaccaaggaagataggcttctacatgggctggcctggagcgcagagcccatgtgtgaaggagacagcgtaatgatacatgactggttacctactgcaattgaatagtaagccagttttctcactggctgagaagggagtagcaaaaatgaaaggaaaaaaaaaactagaatgaaccatgtagtgttggattagaatgaaggcatcagtttaaacacctgtatggattagaactggaggttcagaaataaatatagatgtaaatgtgtatatatgtatgagtgtgtgtggggagggatgtgtgtattcaaacttaacaccccttgctttgtccattgagaggacctggtagcagtgccacctgatagcactgagcatgaccagagcacaggttctaacttccacatattattctccaggaaaagtaaccagggcttcttgaaaaatggtttatcctaggactggggcaggaaaagtatagatgatcttgaaatatcttgctgtgccggaaagcaaggaagtgcccaaacacatcaaaagaacatagaaaccaatttgaagaggcttccactggccaaatctaggacattatgaacagcaaagtaaacaacgagagcaaatagaacaaaattagaaggcttgagtccacactgatacaaataaagtataattcagaagattaatgaagaatgggatatgtacatggttttaaaatatttccctaccaaatcttactaattaaaaagaaaaaatgtatcatttcacagtgaagaaggctggcagacaacagtcaatcaggtgatcaaagtgaacatcaggatgcaattggaacagagtattatccctgatattcctgccaaaggtaagtaacttgaatctaattatgaggaaacatcagacaaacccaaatcaaggaacattctacaaaataactggcctgcaatctttaaaagcactaaagtgcaaggaagacttaggaactattccagacagaaagagaccacagagacaccacacttaagtgtaatgcttgcatttaaatcttttttttttttttttttttgctatgaagaacatacaaagaacaactggcaaaacatgaatgacacctgaatttcagatggtcaaaatgaactggtgttaatctcctgacttttatggttgtattgtggttatgcaggagaatgtccttgctgggaggaaatacactgaagcatttggggatcgtgggtatatcagtttggcaacttactatcaaacagttcaggcgagggggaagctctttgtattataattgcaacttttctgtaggtgtgagattgtttcaaaataaaacaaaattatgtatttgaaaaataatcctcatcctcctttccaaacacataagattactgaagttaccttaggtgatagcagccctgggaattaatcatccacagctgatacttggaccaacacccctataagcaacactattccattcttagtaggaagggaggctcagttgagtgcagagccttctgagtttgggcccgaggcatttcaaggtagcctcttctctttttctactcataagcacaggcttagatgaaaaagagaaggaagaaaaagaactttgaattaatttgtctacacaatgggacagattgagaaaaaatttaaaatctgtgtcaagttcattgcattagaaacagtgaatcagcctgatataataaaagtacaattggtgccttcaggatatcatttaatactatctgtacctagcatttaacaaatgaaagcctaaaagtgatttagtatcaacattgtaggcatcattcaaattaaattaaaagatgaaaaacacagaggttctgcaatgttgaggaccttattggggtgaaggcaggattagaagccatggttgtcactccatcatggtctaacatgaatgcccctgctctctccactacaggaggctgattctctgtttaaaaaagaggttaatgctattctcttctccaagaaataatatgctctgggagaatcaagagaagcagacatgaattaatcagaatttgaataagaatccacctgctgccccatttgtgacatatttttcatgttttacaaatacaaatccttaatagaacatgtacgactggtgatgaaataatattccaagataccagactgtgcatattgttttactgcctctctgctcactctgcattaagagcttcattgattccaacacccaagccaccattttgtaagggggagcctatagttactggtggcctgagagggttcattgtgtatcaacgctgcttcccctataaagttcaacatgctgcctgaaatatgaaaatcatcttcttgatttccttcagtctttcaaataaatacttgtgaatttaatcaaggagtcagaaaagacagttggaattagaaaataaaatggtatcaattactaatatttcccatttgctgctcaggcttgtcttatctgaagcttgtaaagttgtttaatcttttccatcatctcagggaaaacagagcctggaaaatcctagtcattccacagtaactatcaatgggattttccataactatctggatgcaaaatgaaaatcttaagaagttgatccaattctaaaacttacttctcaacttactcataaatatgaagagacaactcatccatattttcttcaaataacatctggttgcttggccagactgttaatacctgaaaaagtttctgagtttgttccaacaaatctacacttaaagagcttaaaaatgtgtttatgcattaaacattcttttccacatctgacttagggccagcgatgtgactgtcagaaagaaccttgccaagaactcggaaagaaagggaaaacaatgtcttttagaagtttaactgtgaaaccagcacctattggattagggcagaggaatgagaaatcaccgcaaagggacaaaaatgcttctaagccagcaagagttggctgtgactccactaaaggtataaaacacacatctaaaggctatattagtcagtcatggagtcatggaagaagggttgctcagacagacttgagcagtactcaccaagggtccattctgagtggaaggggtcaggaacagcacagttggggtagcacagaaccaccaccaagtcatctctattgtgaaaatcaatgcatcactttgcctttgcctgattaccattaaaccttaccccaggctggcctgtcttattcatgatggaaaactccacattgagcatacagcctaacctagggcaggcaatcattagatgtttgctcaatgaatttgctccaactctttgctcacaactgcctgatgataatttggctccccacatagttctgactacagggagagaatgacctagtctggtggatttgagaatgctggtcctcatgccagcaataagactcattgaagtagacaggtttagcatttgagtttccttactcgaaggttgttcccaaaggaagggtctgtgtgtgctgctgtatcaagtttctgagcccaaagggctggcagcaagtctctgggctatggtaactttaccaggataatgatgatagtggtagcgatgggaccaaccttggccatgaacagagcatcttgtgcgtactatcagacattgtactgtatgttttatacacttgagctcatttaattcccataataatccaataaattaggcattataagtattcacattttgtaaatgaggatactgagactcagaaagctttattaacttacccaaagacccatattcagagtctggattcagatccagatttgtctgactctaaagtctaatttttttaattgtaaaaaaaaaaatactacctttggagagatgaacccttatccttctctttgacacactcctctgcttcagcagtgtgctctcggccatcccagtccatcttcaatatgactattcatcaatgcgccactactgtacaagtcttcacataaaattacataggataccaatgcacccttaattagaagtgcacaaagtcaagccctgttgcaaggaacagcatcaccatctaccctatgccatcagtaccattagcttcacaagccaaaaatgggggcctctttaacgttttcctctccctcaccacgcctgccacaacccgtccaatcatgtacattttcctcagttgaacctcttcaatacttccctaatgcattcacttgccccctgttcaccatttccatcgctactacccatctctcacctggaccactacgacaatctccaagattgtgttctcacttccacttttgctccacatggctccattttgtgtccacatcttgggaatgcattcttaaggacacatccagggatctttatataatctaatcacaaattccactgtttaaaactcctcagtatgacccttcgccatgtcctgggcttcagccctaatagtgagtggtctgtggtttttggaatttactcagctctaaaaactccgggatggcacacacataccaggcatggatacacctgcatccccctggaccagcagtctctccacatctccctggaaaacctgtacaggtgttttggaactcactctcatttcagctcctccaggaagcctgggttaggtgcccaactgagttcttctcatcacaaccccagctctcacccctcatcccactgtatggaaattttttttatttatgtgacttcacctccagactctgacctccctgaaagccaggagccattctgtttatacacagtgcctaacatgaacaaatgcttgttaaataaatgaatgaatgtgaacctggtataccataggcgtcagaacccccccctagcttcctcaagcattagctgtgtgatcttaagaaagttgcttaatctccctagacctcagagttattgtctgtaaaatggagatcataaaacctatactgtcaagttattgtgagatttaaactaaattatataatagatgtaaagtcctcagtgtcatgcctcatatataataagtatgcaactgttagttgttattattattactgtgcccttcaagaccctactgaaaacattcatgttcttgaaagacttcgaatcaattcccagtccaccatgatgactgtgctgctctgtgctgcatttcataatgcattattttgcacccttgatattgtttgaaagggtctgccctttccgtactttcttcaagtcgcctaatacttgaacaaatgcttttagaataaatgatattatcaagtttggttttgttctataaactaatggtgcccttttgctatagatcttacagtccattggcgtttcaaaccatggaaattcactttgcaactcctaatgatgcaaatgccataaagagaggccagtgagaggaacacacttagggggaacggcagggctctggaagggagacaggtggtgatcccaaattagaaatcaggtcttaaaggggccacaagcgagatgacatctcaaaaagagggtttcctttgtcacaacagatgtgaaaaggtgaatggtcagaccaatacttaaaagaaacttacagctttgcccctgtaagcgatactgtgcagccattaaaaataggaggcaagctaataaaatggcaaataagaacatataagggacaatgttaagttaaaaaaagattcagataacgtatggcttttgatcatagtatgtaaaatttgctttaaaataaacaaaaaacttaaaaggagtagaccaaaattttaatgctgtaacaatttgctaagtttgtgggtgaaattttctttttatcactttcccataccgtttgtaatcttgccatattcttttaaaatacaaaaagtatttcttagaaaatacatattctgcgtgcctctctagcagatgtctctagaaagaaatgagatagcgcagaagacacgccctagactgcagggggctccatgagcccagagcctgactcagcagcgtgagaacaggggcgaacctgggcatggggcactctgcagcttgatcccgccctggatgggtcccttctttacctgccaccgcctcgctgggtgttactgagtcccccgccagcaggccgccctcggtgggcgcagcgcccctcccagtcccggaccatgctatccccaagagaccctcctcgcgaaagatctctctgggagaagggaggagctgcaaggggccggaaagagttacagggcgcaggcctctgcgacctcgccctccccatgcccgcgcggctccctactcccgccccgcgggccgatgacctgtacctcttgcaggggatcagcgccttcctctcgtccagcacccgcacgcgctggttgagcccgtcgtaggagagcagggcgcggctgttgcgcccgctactttgctggtacataacctggcgcccctcccactgctgcggcgcctggcacgggcgcggggctcccaccgcccccaggctgcacaggccgcacagggtccaggcccagaggccgcccagcagccaggcacccagggcgcccgggacggtgcggaggggagcgcgtcctggcatcgcggtcagccttccccggcccgagggcaagcccaagcccaagggggcgctgaggcgtccgggatcagagtggctcccgccggctctttccgcactgtgccgggagtgtggtctggaccaaagtgcttcctgtcccttcggtggcctctgccgcttttgagatccggacgcgcgagtcccggtagccgggaccagggcccggggaaggctccagtgaatcgcgcgggagctatttctgcctgggccactgcctgctgccactgcctgctgccactgccttctgccgcttcggttttcactgctcactgctgccaacaggaaatgcagtggcagtggtgccactagcatcctgggaggcatcgtgttttaagaggggggatggggggagactgtgctgagaagtgtgtttctccactaacttcagtgttcaacaggtaatcacacagggaggggcaagttcaaggtcaagataggaaaagcagagctgctgcgtttgctgtgcaaacgtttgccccgcctacattgcccctcgacaaaattgcaaacttcttcctccaaattaaaagtggaaagacgagtcttttcctgaagaaatgatactagctattcatcatggccgctcctcagctcccattcccagtgaagagtctaggagactagtagacagccccttgcattgggcctaggactcatggacatagcctcaaggtcacattgcagtgagactgctcctcccatcgcctggcaataccaccagccgagtggtttgggtgtctggggggtttcgcttcttcaagaataaggttaattgggtttatagttatgtaatgttaggatctataatatggaatgagcgaggctcacacacctgtagtcccagctactcctgaggctgaagtgggaggatcgcttgagcccaggagttagaggttgcagtgagctatgatcatgccactgcactccatccagcctgggtgacatggcgagaccctgtctctaaaaatatagtgataaagtatgaaatcaagaaaaaagaaaggaactaaaaaaatgtatagcgtctttccatttgaactgcatttcaaggatgattaagattgagccaggtgaaagtgggagataacattcctgaatgaagggcataaggacaagaaaagaataatgctggggttcaaggacaaggtagaggagtactctgaagccatagcactcattttaaggaatttgtcattgatattgaggactgtgggaactatcaatcaatgtaaagctagggaggagcatcatcaggcatatgctttagaaagcccacttagacaacagaaagggtagggccagagggaaggcagggagaggaggaagctactgttatcatcctggaaagagatgatcctgactcagctaaggcagcgggagtggtcatggaaagggtggaagacaggtgggagctgtagagaagcatttcaactcagagagagaggtttctggtttgggccactgggaatccagtcctgagtgaggagagatgatcaattcattttaggattggttgatcttgagctgactgtggagtattaaggtggaaatatccaagggacagctggataaatacttctggaaaccagcagagcttttggattaggaagccataggtacataggtggtaaatgaagccgaagagtagaacagtggttcctggggaaatttcacatccccctccccagcaaagaaacatttggcaatatctggagacatttttgatgatcacaatgtagatggggaggaggctaccgctgacattttgtgggtagaggccaaggatgctactaaacttcctacaatgtgcagtacagccacctcccctctcccaaatgaagagaaaattatctggccccaaatgtcctaagtgttgggggtgagaaaacctggagttcaggggagtgttgagtgtgagaagaaggattaggatggagccccagagagctccagacatttaaaggatgggcaaagaacaggcacttgaggagaccaaaaggagtcaccagagagaagccactgaatgaggcaacttcccgagccttgttaaataaatgtaaggcatggaaagaatggactgaatgctgaagtagggtgttctagaatcacagcctccctggaagtcccgaagaggagggacagttgacaggttttcctgatgcatccttctctgctgccccctgtctgtcgaaccaccagagacactaccaatgggccgaatggggcaggcacaaagctttaggaagaagggctcttcatttcctcttaccttttcttaaagggcatgcctcagagaacatcagggaagcccataagactttgtgacttggtacttacatagttaaacagatgcagcaggttcaaactggctgcagaaatttgagccctctccgagtttgccctgctcagattcataggaaaagtgtagggtagttcagctctttctcttgctccccaggtaggaactccagctgaaaatctttttcacccagtgaagggtttagactcattggagtttactgctagaaatggcttgagatgtcatctgggctttcctcctcatgtgatattttactagcctggcttggcatctttggaggtggagactggttctataggaactagattacctttctagagtggcttggcagtgtaagaacaccctgggcttcccctaaataagaaccagactctttggatgaatcctgaaatgtatttgtctcatttatccttttcacttactatgtttaattcatgttccctaaaaaataagataatgcatttaaagttcttagcttcataccttgaccattgtaaattcccaatagatgtcacttgtgcttgttgtttcctcagctgttttaatccttagtctttagttttaatcctcagtcaaaactaaactaattgtgtaggtttaagctttggagagaaaaaccatgtgccttaaattcaagttaaactatgtttttaaagattaacattcagagaacatgtttccatattgctgatgccctaataaatagcatataccagaagtcttaccacctgaagattgatatacatcaatctcatataaataaatcctcccttttctgtagatagctgagccagcaattggactaccttttcctaatgcaagtaagataaaagagaaagcaaaacatacatacttgcatcccatagtacacagcttcttactcaactcaagcaacagtctctgagcacatcaaaaatcaagattttaggctgctgaggtggaaatcctttggcatgaaggatcagagcaggggagacctttcagattgtggtgcccaatgttttctcctgggttccactaatgctgcagaggggaacagggagttagaaggaagaggaaatgttagaagacatttctgaagctggaagatgctagcacaccttcccccagttctgttaacttcctggagcagaaacaaaccaagtgttatactggaaaaatttcggcccaaactgtctactagcaacaacaacaacaaaccacactccacacaactaagggcggagtgggagtgatttatacaacgtgaccctcctgttctgacattcactgcactctcgcctgccttgcaggacattgtcccaactgtcctcagcgctcctcatgccccctaccggagaaagcaaatatatttcagaattagagggcagcagaagctcctattttcccccaactctatacttggaaaaactctaaggcagagggagcaaagttcagttttcagccaaagagtgtctttctctctcttgaaattctctcccgcaccctcttgtatccggtgtcgaaaacaactgccagaggttctttttcttggtccgaagaaaaaagactggccagactaaaaaggagggactttagggggaaagcaggcttccagccctgggctgcggcccagagggggtgatgtcaccgcttctgcaccgacgggcctgggggtggggcggccgagggggagcccgcgccgcggctgcagctgccaagggagcgttccgagcccacgtcaggggaggtgtcgggataaatagggtcccgcaatggccgtggctggctgcgctccgagctgcggagtccgggactggagctgcccgggcgggttcgcgccccgaaggctgagagctggcgctgctcgtgccctgtgtgccagacggcggagctccgcggccggaccccgcggccccgctttgctgccgactggagtttgggggaagaaactctcctgcgccccagaggatttcttcctcggcgaagggacagcgaaagatgagggtggcaggaagagaagggcgctttctgtctgccggggtcgcagcgcgagagggcagtgccatgttcctctccatcctagtggcgctgtgcctgtggctgcacctggcgctgggcgtgcgcggcgcgccctgcgaggcggtgcgcatccctatgtgccggcacatgccctggaacatcacgcggatgcccaaccacctgcaccacagcacgcaggagaacgccatcctggccatcgagcagtacgaggagctggtggacgtgaactgcagcgccgtgctgcgcttcttcctctgtgccatgtacgcgcccatttgcaccctggagttcctgcacgaccctatcaagccgtgcaagtcggtgtgccaacgcgcgcgcgacgactgcgagcccctcatgaagatgtacaaccacagctggcccgaaagcctggcctgcgacgagctgcctgtctatgaccgtggcgtgtgcatctcgcctgaagccatcgtcacggacctcccggagggtgaggccgtaggaaggatggagggaggcgaggaggcgcccggggctgtggctgccaatcgagaactgggcggccacacctaaggctgccaggggcgtctgaggcttgtaggaggtgggaaagaatgggggaaacattttcttcagaaaaagtctggtttctcccataggaattttaggagctagcggagagcactgcaccccataaagaaaaaaaaaaagattttgcttacaaagggagccttcgatgatgtttgcatttatagtaataacagaaatgataatagcagtaaacaggtgttgctaggtgtctgagcaagtgttaaacacattacacgttattgactcatttaatgcccaaaataatctcaccaagcaggtgccaatactcgttccatttagcgctacttcttaaaaagtttttttttttctgaaaaagcagtaacggtcattgcttcccaccaggagtgagatttgtaattgcagtttccctggaaaattgtgaggtctgtttcatagtcattggcccggagccaactacagtggcattttagttaaccccatctctgcttccacttccttcttttttctttggtcatttgactgcttttctaaaaagaaggagaggtttaaattcacttcttgaaatgaaacctaggaatatttttgcattcttttatccaggctttatctggcccaggttaccccacatttaaacagactatgatattgctgtgctggaatctctgaagttataccccagagcattgctctaaacatgaaggaggagtggttaagtgaacagggtaaatggaaactcctctctaatttagagttttaggaaagaaaacatatttattgtttaaattatataaataatagagggttatgcttggttttggttatatacctgtgaactgtttctgcactgcaagatatgaggtagggatttggaaatattttggttattttgattaacataaactgttaacttggaaaatcaacatttaaatatgactttgggagagagtgatgtgatttatccagtttggttgtatataccagtgaggttaaatggatatacattcacatcgatttgtgcttggataggcaaatattcccccagaggatttctttcctaagccctggatatcattatgaaaggagaagtcaacaatcacatgccgtttttacttatataaatattttttgtcttgttttctttttttgagatggagcctcactctgttgcccaggctggagtgcaatggcacaatctcagctcacggcaaccttcgcctcccgggttcaagcgattctcctgcctcagcctctagagtagctgggattacaggcatccaccaccatgcctggctaatttttgtatttttagtagagatggggtttcaccatattggccagactggtctcaaactcctgacctcaggtgatctgccctccttggcttcccaaactgctgggattacaggtgtgagccacttcgcctggcccatttttaccattaaatactattattttgagatactgttttagtttatatcttcagagggctctttataccagctgggtgaacagaccaaatcaccaaccacgcccatgtggccctgtttgtgtttcagatgttaagtggatagacatcacaccagacatgatggtacaggaaaggcctcttgatgttgactgtaaacgcctaagccccggtgagttctttcttcatggacgttccctctacttctcctctccagagtgatttctgttctttttccaactttctgcctcttctgccttttttagatcggtgcaagtgtaaaaaggtgaagccaactttggcaacgtatctcagcaaaaactacagctatggtaagtcgtctgttaaagccatttacttttgagacttggttcattacaaagctggaatctcaataaggtcgctctcactaaagctagtcacaaagtaaagaaaacaaaaggttgactatttttccagttgatcatgtgaattctattaatatatggcacaataacaactgcaaaatatcttgcttttctggatgaatcaagtgcaaacaaaggaaatgacccaggtgataaaaattacatgcatcagattgaaaatttgacatcttgatcctccttgtcttggtgagaagtgcttatcagccctgatggcacaccccacctgttctcttcctgaggttttactgctgcaggaagaatgagagaatgatccatggatctgattatctgagagtcagagaattaaggcccataggcccagacaattaagatctgcctgcatatccttttacttgtgactagctacaaatatttaacatcttaaataaattgtgaaaaaaatgttaatcacaaaatcctatggttacactatcgaactagtttaaatgccctcctctctcttacttgaaagaaccattcagcattttcttccatgaataagtcagtcatgaaatttgaaatgttttaagtaattttaatttcacaattgtcatctgaaagtaaatttaattaacatatgttctttttcaattcaaaaagaaatgtaaaaggcagacattttaaaaatgtctgtttgggctgcctactttatatttcattgcatgtcttaaatcatttctgctgaaataacataaagtggttttagggaaaatgcttattttgtttgctgacttagttttcatcttgcagattgaaattttatatcagtaagaaactttaggatacatatcagacatgaaagtaggaggatcacagaaatgtagaaatctgaaaaaaaataagctgttacaaaactatcagatttaagaatcatatttagccaatgggggtaattcagcaacaacaaaaagtagtttatcttttcctgtagctttttttcttaaagcctgctctatgtagctaccatcctcatctgatttacttagtccctcctctgccaagatccagcctgagatattaatctgagtttcactgtcatgtcattctctggggtgttatggcctttgaacgaccttgatgaagaaaccattttgtattcaagtcctttggtgtcttcataaactggcttcctgaaatggaatccaagacagagccatattaggctgattacaactctacgggaggcagtaatagcaagagaccacagaaaccagcatttaaaacttggtcagagacagtgacattaacagccatctgtaataacagttctatctctgctcaccatgggtctactttgtcagtctgtgaagttaaaagattgagaacagtagtcctcagagactccctccagttcaaaaatgttatgactaatgactatctctgtaaaacagaagaagctcaagcatcagatgagtgattgaagaaatgcaaaccttaagatgacttctgatctgaatatatatgatccccacttcaaatcaccacaaggaagaatacaaatatatgtttctgtgaattttttactgacctaaaggcagagaaagactaaaacctgcttttcagcttgctttcctatcttgcagtatgccccggaacatttaagacaatgttgacaatataggacaccatccatttagcatatgactgtgtgggctgtttgcctgcactcaggccacttggacataaccataattacaggagtgattctttaagagaggctcagaagttggcatgaatacaccatccctagtttttccccaaaaccttcaacaacacttttatctatttttaaattgcagttattcatgccaaaataaaagctgtgcagaggagtggctgcaatgaggtcacaacggtggtggatgtaaaagagatcttcaagtcctcatcacccatccctcgaactcaagtcccgctcattacaaattcttcttgccagtgtccacacatcctgccccatcaagatgttctcatcatgtgttacgagtggcgctcaaggtaggcacaaagaggcagaaggaactgtatgcacactgttaggaagacctcaatctcagttagcagtcatggtttaaaaatataacaaaaatatgccaaagtctttttaaaaaaattagtttaacagatgcctctgtttgaatagcatatattctatcaattaattcttcatagaatgaaggaaaaatcaaaatatgagtatttgaatagagtctttaaaaatcagtttcaaaattcattaagtgacttcaaaatttacagcaagtcaattattttaaggaagaacaattcttttcaaatcattcaaacaattttagagtggcacatactgaacttttaaggccactttaatagcttacagatcaagtaagtagggagttgagactatagttccacatattttccatataaacacttcataatatttgatagagtattgcaaacaaacacgcatgcacacacacacactttaaggtgatttctgaatcggatatgtgattctcaattcaaatcatcacaaggcaatgtataaacaaataaatatatgcttcacacacactcatacacatacacacaaattctagctgtgtgtatttgtctccctggcctctctttctttcttattttttttggatattggtacattacttgtaatataaagtcaaactcttgagcccagcctccatgttgggccccataagttgatgcagtatacttctccagcaaaatcactcagttttacataacaaggcatccctcccattctctgctgttaatgctcatctgtttcttctagatataacctaagactattcctctgaaaagaaaccaaaaacatctttgggaactaactccacttttctgtattctatcagtacttgggtgccctccttacaacatggatatcaccttgagttcttggttttaaagccagattctgcgtatatcttgtctccctaaagaagcaatcagtgattctggactcatctctaccaaggtgtttgcatctgctgcagtgctagagatccagttggggataccaggttgttggtcattacattctatctggagagatgaatggattataatccatcccagtaaaaatagttttggataattgggatttatgtcctcacaaatgattctaataaattggtaagggtatgtaaagacaattctgaaaataagagaggaaatctgccttatgagacccgcaaacctggtgtaaagttacacttgttaaaaccatgtgatgcaatagtagacgtaaagataaatgaaacagaggaaaaactcttgaaacaggttttaatgcataaaatacagcttttcattatgaaggaaatatggcacatcaatagaaaatgaatgtattatttggtaaatgttgaaaatattcctatttgtaaaaaaatacattcttttcactttatactgtgctttacaataactttcaaatggattaaatagataaatattctaagaactttaaaaaaaggacaaaattagtgactaaatatgttatatctgaaaagaaaagtaatttgtaaacataaaagtaatgtaagaaattacaaggaaaaatatcaatacacatatctgactgcataatattatacatataaaaatcacaaataatgatagaaaggcaaataaaaattgagaaacatacttgaaaagatatgaaaaaatagtaatcttactaaagagttcataaaattaatatttaaacattgagatcatgatatagaaatatatatacagaaatttatatagagaagttcaaatagtaatacaaatagaatacagatagtaagtaaacatttaaaaaattatctccttaattctaaatccaaataaaaataagattccattttcacctaattcttaatgttagtgaattggatgaaagtgcaaccattttgaaaacaacttggcactatgcattgaaaatctttttaaaaaatacataccctttaactcagttattctattttaaaaatctgtcctaagaaaataataagccagtgcacactactgtatacagggttattcaatgcaatactggtaatcatagctaagcaaaaggggaattcagcaataaagaaatggatagatatattatggatatccatattcatagtattatattattaacattatatttttaaattactctaattacatcagaaaatttagatcatataatgacaaaaggaaatttgcagatcagcagatcatctcaatacacaatgtgatctaataaatataattaatattgttacaaggaggaatgaaaggaaacaccaataaaatataaatggtggatgtgtggattatggggtaaaggattattgaataatttttttacaatttctgtatttttagctgtttacttttgtaataaaaatctgtttactaagataattttttttcaggatgatgcttcttgaaaattgcttagttgaaaaatggagagatcagcttagtaaaagatccatagtaagtatcatgaacaatgctgtgaagatggatgtaagtgcacataacagatttctttagagttggggaattcttcccattctctaatctccaagctctcataagagccagcaatagcaacagtatttgtcttttgaataggccgttaagagtgtagctattctcactcagaatttttaccaggaatctatcattcgacttcaaaggtgatttagttgtgttcaatactaaggtactggttatttccaagttaaatgagccttttgtttctttattacatgtagttgttttagtgaaccatgagatacttgagcagacttaatatctattgagattaaaactgacatatatttggaggggtgaaatatctagtactaaaacttaccctatcactatacacagcagaatcttttcctgtatttataataatttaagacttttgtcaaaaattatatgcaaaaagtaatcgttttgcagtcaaatctatgatttttgtggtaacatcgtagaaatattggtaattcaattagaggagttagaataattttttcccagagatgtgaaattataccaatctaaagacaccaggtaattggttttaaatttttaaagcatccttctttgcaaaatatgtcatatatattcagaagaatttgtgtttataggttcacaaaacatattgctattgcctatgctctcttagtttgcaccaataaagagatccaagcaagagaaaagtacatattaacaattgagttatggagaatgtagttagaacacagcctccgctagtcagtgcgtttctgaataagagaaccaaacactattgtgttaaatcagagctaaaaactcatgagctgctcaggagcatgcttagttctattagacaggaaattctagcaagattggttatctggtttccaggactacagtagattagaagcatcaatacatgaaggcaagcagaccatgagaacctgagcttgccaagaggaaagcattcaataatcatagctctggggaccattcagtttggcagcatattttccaatatacttcagtagaaatttgcaaatatcaccacatgatagcaacataccatagtgagtttattattttagaatagactagaagtgtgtcatagcacagtggggacaatgtttttcttttctttgcattcctagtgcctagaataatacccagctgatgactgtggtcaaacttttggctgaatgaaatagactctagccaagcaggcacatctgcgttaatataaagcaatgtcaattcaagtggactcacttttttattgttccttacttgagctatttaaagaataaatttttttctatcagagaaacttgatttttcagaatgactcaattcccaatggttctggatagctagcacgttagcggatgactaggtgtagaaggggcctctgtcttcctttggatgtgggagaatgaagtgaacaaactcctgacttcccagtgacatggggtaaactaatgctagtagccatgaaataagagcctttttagaaggctttgcactgtaggaatgttgcattatggggctagtggtcaaaagtgcatgggtgagggcctcaggctctggagtcagagtgggtgaatttgaatcctgactctgacatttaccagctctgtgcactgcaaataacctctttgggcttgtttcctgcccctgtcagtggtgcctatttggaaggactgttgtttcaatgaaatgaatgcatgtggaaacttcatcacacactgagcactttccaagtcacctggtacatgataagtgcttcacatagggtagctattacaattgttaccgtcattaatatattacagtgaaaaacttgccttaattttcacattagctgagcaccataaaggggtgagataatttgacagtcatgtttacaaattgcttttcagcagtgggaagagaggctgcaggaacagcggagaacagttcaggacaagaagaaaacagccgggcgcaccagtcgtagtaatccccccaaaccaaagggaaagcctcctgctcccaaaccagccagtcccaagaagaacattaaaactaggagtgcccagaagagaacaaacccgaaaagagtgtgagctaactagtttccaaagcggagacttccgacttccttacaggatgaggctgggcattgcctgggacagcctatgtaaggccatgtgccccttgccctaacaactcactgcagtgctcttcatagacacatcttgcagcatttttcttaaggctatgcttcagtttttctttgtaagccatcacaagccatagtggtaggtttgccctttggtacagaaggtgagttaaagctggtggaaaaggcttattgcattgcattcagagtaacctgtgtgcatactctagaagagtagggaaaataatgcttgttacaattcgacctaatatgtgcattgtaaaataaatgccatatttcaaacaaaacacgtaatttttttacagtatgttttattaccttttgatatctgttgttgcaatgttagtgatgttttaaaatgtgatcgaaaatataatgcttctaagaaggaacagtagtggaatgaatgtctaaaagatctttatgtgtttatggtctgcagaaggatttttgtgatgaaaggggattttttgaaaaatctagagaagtagcatatggaaaactataatgtgtcttttttacaatgacttcagctctgtttttagctagaaactctaaaaacaaaaataataataaagaaaaataaataaaaaggagaggcagacaatgtctggattcctgttttttggttacctgatttcatgatcatgatgcttcttgtcaacaccctcttaagcagcaccagaaacagtgagtttgtctgtaccattaggagttaggtactaattagttggctaatgctcaagtattttatacccacaagagaggtatgtcactcatcttacttcccaggacatccaccctgagaataatttgacaagcttaaaaatggccttcatgtgagtgccaaattttgttttcttcatttaaatattttctttgcctaaatacatgtgagaggagttaaatataaatgtacagagaggaaagttgaggttccacctctgaaatgagaattacttgacagttgggatactttaatcagaaaaaaagaacttatcttgcagcattttatcaacaaatttcataattgtggacaattggaggcatttattttaaaaaacaattttattggccttttgctaacacagtaagcatgtattctctataaggcattcaataaatgcacaacgcccaaaggaaataaaatcctatctaatcctactctccactacacagaggtaatcactattagtattttggcatattattctccaggtgtttcttatgcacttataaaatgatttgaacaaataaaactaggaacctgctatacatgtgtttcataacctgcctcctttgcttggccctttattgagataagttttcctgtcaagaaagcagaaaccatctcatttctaacagctgtgttatattccatagtatgcattactcaacaaactgttgtgctattggatacttaggtggtttcttcactgacaatactgaataaacatctca

SEQ ID NO: 8 - DNA, 2826 bp, Homo sapiens
agcagccggcacggggacagccggccgcacaacggatctgcaggcgcggagcaaaatgcacccgccgcgccgcgcggtcctgcagccccgccacggccccgcggcccgcacccccccggggcgacagtgagcctctcccgccaccaccgggggccgagcggagggctctcgggtgggagagcgggaccagatctcgacagctgttcatttccaggaagccaccgcagccagagcgaaaggggaccttctgccaccagcggggcatcagccagcggcgcgcatggatttatgaagacactcatgcaagaagtgggcaggacttggacaaacttttccaccggctccgcgtccgccgctccccgcgcctcgtctcctttcccctcctctcccggcggccgccgctgcccgcgatggtggccgcgctgctgggcggcggcggcgaggcccgcggggggacagtgccgggcgcctggctgtgcctgatggcgctgctgcagctgctgggctcggcgccgcggggatcggggctggcgcacggccgccgcctcatctgctggcaggcgctgctgcagtgccagggggagccggagtgcagctacgcctacaaccagtacgccgaggcgtgcgcgccggtgctggcgcagcacggcgggggcgacgcgcccggggccgccgccgccgctttcccggcctcggccgcctctttctcgtcgcgctggcgctgcccgagtcactgcatctcggccctcattcagctcaaccacacgcgccgcgggcccgccctggaggactgtgactgcgcgcaggacgagaactgcaagtccaccaagcgcgccattgagccgtgcctgccccggacgagcggcggcggcgcgggcggccccggcgcgggcggggtcatgggctgcaccgaggcccggcggcgctgcgaccgcgacagccgctgcaacctggcgctgagccgctacctgacctactgcggcaaagtcttcaacgggctgcgctgcacggacgaatgccgcaccgtcattgaggacatgctggctatgcccaaggcggcgctgctcaacgactgcgtgtgcgacggcctcgagcggcccatctgcgagtcggtcaaggagaacatggcccgcctgtgcttcggcgccgagctgggcaacggccccggcagcagcggctcggacgggggcctggacgactactacgatgaggactacgatgacgagcagcgcaccgggggcgcgggtggtgagcagccgctggacgacgacgacggcgtcccgcacccaccgcgcccgggcagcggcgctgctgcatcgggcggccgcggggacctgccctatgggcctgggcgcaggagcagcggcggcggcggccgcttggcgccccggggcgcctggaccccactcgcctccatcttgctgctgctgcttgggccgctcttttagccctcgcgccccccgccgttggctgcgggagagcccgcgtcccactcccgtgctcgcctcgaccccgcgccgggcacctgtggcttgggacagatagaagggatggttggggatacttcccaaaactttttccaagtcaacttggtgtagccggttccccggccacgactctgggcacttcccctgaagctcctctccggagcttgacttcttggacctcctcccccgccccaattccaagctccagaaactcccaactcgtctgccgtccagaaagctagctgcagtgttcaggacgtccgggaggaagcaagcatgtgggggacagaacagtagtcctggactcgaaagggaaggtgctgaccagtggggccttagcaatttgaagggttgggaaggaggaattatatttgcaaaggggctgtctattagcatatttcctttgagggggcaaaaaaaagtgccagtatcgacttttacagattgtggccagtgaggatattataatcctatgtaaacagaaaagtcccacttaccgattcattctttcactgtttgtatctgcgcccagaattctcagtgacgtgggggtgagggtgggtggcgattgccttagagggaacccctaaattggttttggataagtttgagcccttgaccttaatttcattgctaccactctgatctcttagcacatttcttaggattaagggtccaaaaatgctgatctaaggggttgccatggtgttgaacaatgcaactttttatttaaaaaagctctgcactgccatgtatgaaagtctctttatgatgtttgtttttttgtcatttttgttctttacatcaagaaattttatgtttaaatatgcggagaatgtatattgcctctgctcctatcagggttgctaaaccctggtacatcgtatataaaatgtattaaaactggggtttgttaccagttgctgtactttgtatatagaatttttataaattgtatgcttcagaaataatttatttttaaaaagaaattaaaagttttaaactcacatccatattacacctttcccccctgaaatgtatagaatccatttgtcatcaggaatcaaaacccacagtccattgtgaagtgtgctatatttagaacagtcttaaaatgtacagtgtattttatagaattgaagttaacattcttattttcaagagaatttatggacgttgtagaaatgtacaaatgcatttccaaactgccttaaacgttgtatttttatagacatgttttttaaaaatcctaagtttttaaataactatggatttgtgtattttttttggttatttgttttattaaaacatgtacatcagtaaagagttttaaacaatg

SEQ ID NO: 9 - DNA, 44971 bp, Homo sapiens
attaagatgctgaaatgtaacttgagggcaataagaaaactgttgaggaatttgccacaggaatgaaacactgatattttaggaaaattatagtgatggccactggaggatggattagagaggatgagtctgttggctggaagaccaactggaacatattgccctggcttctgatttcatgacaaattggcatggtaatacttaatacttaacaggtaaatctcctgtttttcagtaatttctgtttgtgttagatgcttagcacttttgtctaacccttgagttccttctgaccctggaatgcagtggtgtgatcctaactcactacagcctcaaactcttgggctcaagcgatccttccacttcagcgtcccttgtggctggaactacagatgcatgccatctatgttgttttgatagacttttgccttaggctggatgttaagagtttatgactgctcttgtgcaggtattatttcctccaccattaactgagtattagcattgtggtaggcacatttcattcattaaaaataactattcgcagtcaaattcaaagaaacagaaagcagaatagtggttaccagaggctaaggaaaagggagaacaggaagttattgtttagtgggtcacaagtttcagtttgagataatggaaaagttctagagatggatagtggtgatggttgcacacggtgtgaatgtaggctgggcacagtggctcacatctgtaatcccagcactttgggaggccgaggcaggtgggtcacctgaggtcagaagttcgagaccagcctgaccaacatggtgaaaccccatctctactaaaaatacaaaaaaatttagccaggcgtggtggcacatgcctgtaatcccagctacttgggaggctaaggcaggagaatcacttgaacccaggaggtagaggtatcagtgagatgagatagcgccactgctccagcctaggtgacagagtgagactccttctcaaaaaaaaaaaaaaaagaggtttaattttgatgatttacagtgatatgtcttctgtttctactcttattatttagtacatagaggctaaagagactccctggctcaatagcagtgtcgagtttttttcttcttttctttccttctttaaagtgatagttcatagttgggttgccttctgggatttttccgtctttgtttttaaatgtatttgattgacatgcacttaaaatttttgcacctttactatataccagaatgataagaaggatgcaaaataatgtaacactaatccatgttcttagaagctaaagatctgcttaggagaacacgaacttatgcgtgaagtacaaaaagatcagaggagtgatgctctacagaattgcttctcagagaagagagagccatctgggttggagcatcgggaaaccctgtggaggaggtgatgcagggcctggacactgatgaataagctgaatctggacacatgtagcaaggacctgtggagaaacggccaaagaagtaacatggtcccagctgccggctactgaaaacactgcgtgctcctgcctttcccccatcacactagctgttcctctttcatgtcctttactctttttcttcctctaccagtccctaagtaatttcttctagccttaggctttaaatcaggggtgtccaatcttttggcttctctgggccacactggaagaagaggaattgtcttgggctacatataaaatacactaacgatagctgataagctaaaaaaaaaaaaaaaaaagtaaaaaaaaatctctatgttttaagaaagtttacaaattgtgttgggctacattgaaagccaccctgggctgcatgcagcccatgggccacgggttgggcaagcttgctttaaatagcctctcgaatttataattccagcctcagtcctcctcgaagtccagactcatgtatctaactgcttgcttgacatctgtatcagagtgtctgatgggaatttcaaacaaaacatttgattctttctgccccaaactgcttctgtcagctctgttttcaaaatatataccacatcgagtgacttttctgcacttaccgtgcttctagcacgctggttcaatagactgcacctttcacttgtaccactacattatcttcctcaccagttggttaactgttgtcattcttgcagccacactctattctccaggcagcattcctagcattcctgttaagtcacatatcaagctttgccacatccttgcttaaaatcggccaacattgctcttctggaacaagcttgtgaaatagcccgggtgtcagtgcctgtgcactcaccattccctctactctgaatgttcttcccctcccccaatacttgagtgacttgctttccattctcacttaaaatccttttctttggataagggtatctaaaatggcctcttccccttcatcaacatttactccctccctttaaaaaacaaaaaacaaaaaaacaacaaaaaaaactctttcaagtacgtatgtaggcttaggtattttgtttttatttttattgtctgtttcccaccgttgtaatgtaagctcccgggagtcagggaatgttcatttatgtatccctagtgagtagaatagtgccttgcattgagtaaatatttgtcgaatgaatgagctgccatcctgttggttcacactttctgatgtaaggtgatattctgagtgatgtggtcaagacctgccatgcaaggtcagtacagtgaaccgaccactaaaggatagggcaatcctagcaggacaggtgccgggccgaaattgggactgggaaaatgagatacaacacttgtctgccagacaagagtatctgggactctaggggactccacagccaaaaggacataccaagcaagatcttataggtgacacacagttgctgccatggcaagcctccttctgtggaaagcctgctcaaggaattgaagaggcaaattctccaacagaaatgaactctgtgcatactggctgcagccatagtcagcactgaacttttacatgcagagaaagttggcagcactgctgtggagagtataatatttatcttctccaatgggctgtgaacttctagaggggagagtctgcttggttctgtgtcattcccggtgctcagtctgcatttttgccaaacatttgagagaaggattgaaaaaaaggagaaaaaaattatatcatctttatcttcttggccatacctaagggcacggagaaaggtacaattggaatgttctccttcagatccaatcgatgtaaatcttttgtatgcattaaataaccaatgataaagactttaaatccaccccttccagacccaagcactagtcccccaagcagcaaattcatatgcccacaagttcacatcttttacataaaataacaaccaataaataattgaactttaaatcattcactctggagatttaaaatgaatctttgggccattcacacagctccttaatttctgctagggcaagatctttaatttgtactagctaggagatggacattttcttaattaagcaacctgctacagggacaaaaaggtgcctacaaggtttccccagcaaactctaagtaattaaaaataaatgcataaagaaagaatattaacaactgttctcaagagctttgaccattatcccattaggtaacttttatttttaaagtacacagtttccttcaattttggattaaacatgtgactttgttgacatttcatggacaatactaagtgtttcttttgggggttacgctttctcagaacatccctgtgagaaaggaataatacagggtggttggaggagattagaaaattccaagcagcagtttcacatgactagcaaaatgaagcttgaaatagcttcggaagctatggcctaataagatcctgaaaaaacagggatcaagagggccaggcgtggtggctcatgcctgtaatcccagcactttgggaggtggaggtgggcagatcacgaggtcagtagatcgagaccatcctggctaacatggtgaaaccccgtctctactaaaaatacaaaaaaaaattagctgggtgtggtggcgggcgcctgtagtcccagctactcgggaggctgaggcaggagaatggtgtgaacccgggagcagaggttgcagtgagccgagatcataccactgcactccagcctgggggacagagcgaggctctgtctcaaaaaaaaagagtaaagaaaaagcacccaggcttatgcttacagcttgtctgctggggatcctgaacgatacactgtgggggccacatccgtgactagcaatgacccttactggaactatcaacaggaccaggttgatctaagaaaaatcatatggtgacttgtttggtggagggaatgaaacaatataccactaagcccgcgaactgtaataaaataagataaataagaaaaggatgaaaactcagctttgtttcaggggcacctttgtggaggacctaagaacatatactaacattgatctcagtactgacgctggccaaatttttctacagacacactttattagccagtcagcacctgacataagaagaacattacagaaattggctttggaactctacacacctattaatgaaatgtttggtgtggcttttggggtattcaataatagggacagagctaaaatggctgaaatgacccagaatggcaaaaaatgggatagacagccagcccaaatgattagcagtcactgtaaacagtgccctgcaacctcagggtcacccaggaagacgcttcaccgcagaccaaacaggctcaacagcaaacctgcaggcaacggttgctgctccaagtgtgagaagtcaggacactggagaaaggactgtcccagccaagggagcccacccagaccctgtcctcactgcaagcaggagggccattggaaaaggaattgctctcagctctgaagggagaggaggccacccagtgccgtaatggccataactgagactgaaggggcttgaggtccctggcagctcccataaaaggcatggtcaacacaattgaggagactcttgacgtggcagattagaatatccttgaattcattcttttgacagtgtcaagagcctggacactggctggggtcaaggtcccactggcacctgggaaacccccagctcactggtatcacctgggctgcagcagcaccctgcattaatagtcatctttggctttctctctgacctggcaacttatttatttagtctgtcctacactgaaaatactgagaaagagaagaattcttttttcattctgaaggacacaaatgcagcctaagactgaacatttgattgagttctgcaaatgggaaggaaaaacacatagcctcctcagtgtgagtattgtctgtgcttctgccacaaaggtgtgataaaatggctcagctaattttcttgctggggatactgatgatcacagagcaggagaggtggtttccctccaaaaccacactgaacagcatgctgttatcccctccttttctttttattcttgtttcttcttaagcaaatgcttttttattttagcaatagaattcagttcagtaacatctctgagtgttactttgtgcaagagaaccaacggcatgtgacagaaaccctggtttctctagcgtgcctgtcacagcgtgttaccctgagccttggtcccaggttgctgaagtcttggattagtgtgggtctgaccagttagcacactcctttttggatgccttcttacattcactccagctttcatcaaataactatccccaccctagtttctctaaagcagttctagtttgtacattctttcctttcctccccacaaattactacaaaacaaatgtcaggtagtttcctatcaattaattcccaaattagcatttctaaagtctactttaacattttcttcctttcacctttttctgactcaacatcaatgtcttcctttcagatatcaccaacccccaccaccctcccccaacccctagcactaattggttaattgtttcttcagttgcagaaaaatagaaagatctaaatggaggacttacaaaatatggagctcttaaataacggacttgaaattgagaattattacaagccattaatcattatagatctccccggaaatgaatgaatgagaatttatcattgctcttattaggtacgtgcctccaatacttcttcaggaggattttctgaagccccaggtaagcgtttaggcattgagatgaaaacaagcatgagaagccccactttgccagtgtgtgtgtatgtatctgtgtgtgagaagagactgggggaaggagttgggtgtggggtggggactaacggcggcggtggagtgttaggtcctctctggtgtgtgtgtttagtgcgccatctggtgactgaagctcacagagggaagaaagcctgaggtcctaggaagacaggcacaacccagggttggggtggctcctcatggtcaattcggggttgctaaagtggctgtatttcagctttaccagcgcacaggtgacaaatgttgtgcacatcatggagaggtttgtgtaagtcatgacttattcaagaaaaataataaagggctttaaggacctattgagaaaagcaaaaagtacagttacacaattatcccagacagtaggactctaaaagtgtaagtactctggttgaacaaataaatgaaactcttctacgaatgtgggaaatgcaaaaaggaattgaaggaagggaaaaaactgaaggtatgagtagaaaattaaagagagaggcaggatagcatcacgctttgtaggctgttctaaacctgggttcaaatttcagagctactgcttaccttttgtgggacaataggcaatttatttaaactcaccaagcctcagtttgctcatctataaaatgaggatcattctgtttactttctaaggatactgtgagggttaaataaaagaattcacaaaaatactaagcccaaagcttcacatgtaaatgctcaataaatggtagttgttataagcagagagaagagaagaggaaatgaaaagccagaagggagaaagctcagtaaggatagtgtaggacgccttagaaaattatgagaaaggaagtaacatctaggaccctccaacttagcacaaggctaggttgatcaacccaacaggtgaataccacgaaggctgcaatctatgactccagtggacagagggtctctgcctgaagcccacttttgttattatccttacaagtgtctgagagaatgccacagcagggctggccatccttcttggtacccctgggacttcaaggtgtggccgggcaactctatagttaacctctatacaggactttctcagttccatgctcgtagcttatgtgaaaaaagtcaaatgtgaccagggcaagatggggctgatcaaggcataacaactagggatgaagtttgatccagtgagggacgctattagcatgactgagctggcaaggaggtttctgagaaccctggcttgtcactgttggtggcagttaatagtgacatggagagtcagctcgcccagcatggccggaagaaatatccacgtaacctgagaccccttccttctccattgaatccttatggcagactcaggaggtggaatcccaaagctgcctcactctctctttcagaacctgataagtctacttctatggattgcctaaagcccttcagacatctaaagtctctgcagaggaaaatattgcactacacacacacacacaaacacacacactcgggacctccaagggagcccttagtctaccatctgcagccagagctttgaagctagagatcataatgcctgttccctgatgtaacagtcaactgcaatctcgacttgcagccattgcctgcatttctaaccttttaccagcttccttccatgccgaggagaaactaggaccaagaacacagtaatatgatccccaattagcataaaataaaaacaacctagtcatgttttccatgggcttttccaacctcaaactaaaagcacaaagcagggagaaagatataagaatatacacatgggactataaatacatatatactgtctgtgtcagcacagccaagcaccctgacccaaatgagtatctgtctctaagaaaagaatgtagcctgatgcagaaatctgagaattttctccttccaaagtacagtgtaagaacagactggaagagaagttaccccgatgacttggtttggaaggggttaaggcaccagtcatcctcttctaaagtgatttatgatgatgtgtggagtttaaaaactttaccccaccccaaagaacagccttctcactcctcactgagtccactctgaacgtgctaaaatgggaaggaggcggtgttttgctgatctgttaaattcttagtgaagtttccttgatttccagtggctgctgttgtttgagtttggtttggagcaaaactgaggtagtcctaacatttctgggactgaatccaggcaagagaaagaagaaaaagaagaagaaaaagaggaggaaaaaggtagggagaaataaagggaggagagaagcacagtgaaagaaaaaaaaagtcccttttcgacatcacattcctgtgttttccctcagcctggaaaacatattaatcccagtgcttttacgcccggaaacaaagagactaagccagactatgggggaaagggagataagaaggatcctggaactttaaagagggaaagagtgagattcagaaatcgccaggactggactttaagggacgtcctgtgtcagcacaagggactggcacacacagacacacgagaccgaggagaaactgcagacaaatggagatacaaagacttagaaggacagctcctttcacctcatcctacttgtccagaaggtaaaaagacacagccagaaagaaaaggcatcggctcagctctcagatcaggacaggctgtggatctgtggcggtactctgaaagctggagctgcagcacaccccttttgtattgctcaccctcggtaaagagagagagggctgggaggaaaagtagttcatctaggaaactgtcctgggaaccaaacttctgatttcttttgcaaccctctgcattccatctctatgagccaccatgtaagtgtgtaatcttttctgtctttgatctgtttatttgtttctttattgcttattttgaaggaatgaaatgtgaatgttgtcataattaatatgctagtttgcattttctttggagcatccagagcattagttgaaacagtacaagcatgctgactgggaaactgaattggatttcctgcttaatgtaactgtctctgttaaacactaacaaattataggggattgaaagtaacaggatctcatcccattttccatctcctgacctccctccttctctctaaccaaccttttcccctccccttggctgagatacagaaaaagaaaatgaccagctctgtttccagataaataattttctttcttttttccccctcccctttgttttatgacctccgtgcatcgcaaagtggattacacaatgacatggagaatgggaccccgtttcactatgctgttggccatgtggctagtgtgtggatcagaaccccacccccatgccactattagaggcagccacggaggacggaaagtgcctttggtttctccggacagcagtaggccagctcggtttctgaggcacactgggaggtctcgcggaattgagagatccactctggaggaaccaaaccttcagcctctccagagaaggaggagtgtgcccgtgttgagactagctcgcccaacagagccgccagcccgctcggacatcaatggggccgccgtgagacctgagcaaagaccagcagccaggggctctccgcgtgagatgatcagagatgaggggtcctcagctcggtcaagaatgttgcgtttcccttcggggtccagctctcccaacatccttgccagctttgcagggaagaacagagtatgggtcatctcagcccctcatgcctcggaaggctactaccgcctcatgatgagcctgctgaaggacgatgtgtactgtgagctggcggagaggcacatccaacagattgtgctcttccaccaggcaggtgaggaaggaggcaaggtgagaaggatcaccagcgagggccagatcctggagcagcccctggaccctagcctcatccctaagctgatgagcttcctgaagctggagaagggcaagtttggcatggtgctgctgaagaagacgctgcaggtggaggagcgctatccatatcccgttaggctggaagccatgtacgaggtcatcgaccaaggccccatccgtaggatcgagaagatcaggcagaagggctttgtccagaaatgtaaggcctctggtgtagagggccaggtggtggcggaggggaatgacggtggagggggagcaggaaggccaagcctgggcagcgagaagaagaaagaggacccaaggagagcacaagtcccaccaaccagagagagtcgggtgaaggtcctgagaaaactggccgccactgcaccagctttgccccaacctccctcaacccccagagccaccacccttcctcctgccccagccacaacagtgactcggtccacgtcccgggcggtaacagttgctgcaagacctatgaccaccactgcctttcccaccacgcagaggccctggaccccctcaccctcccacaggccccctacaaccactgaggtgatcactgccaggagaccctcagtttcagagaatctttaccctccatcccggaaggatcagcacagggagaggccacagacaaccaggaggcccagcaaggccaccagcttggagagcttcacaaatgcccctcccaccaccatctcagaacccagcacaagggctgctggcccaggccgtttccgggacaaccgcatggacaggcgggaacatggccaccgagacccaaatgtggtgccaggtcctcccaagccagcaaaggagaaacctcccaaaaagaaggcccaggacaaaattcttagtaatgagtatgaggagaagtatgacctcagccggcctactgcctctcagctggaggacgagctgcaggtggggaatgttccccttaaaaaagcaaaggagtctaaaaagcatgaaaagcttgagaaaccagagaaggagaagaaaaaaaagatgaagaatgagaacgcagacaagttacttaagagtgaaaagcaaatgaagaagtctgagaaaaagagcaagcaagagaaagagaagagcaagaagaaaaaaggaggtaaaacagaacaggatggctatcagaaacccaccaacaaacacttcacgcagagtcccaagaagtcagtggccgacctgctggggtcctttgaaggcaaacgaagactccttgtaagtagccttctccttggcattcttctatgggctgaggcagggcatgttaacgtctgtcttgttagttttgtaaaaatcatattgctagatgccagactgtgactgaacctgtactgtgtcaagaagctcagaagtctggcaaaagagggcagcaggccagtagctccttctggtttagtgacctatgaagttctgctcacacaactcatggccctgtggtacaaagtcagtggctggggaccctacacatgagcccaggagagcacctgtagtcagcttcctctagacctgtagggacccttcccccatttctaccactctcttccaagggatatttctggacaaagctctcttttaccaagtccaaaggatgaaaagaaagatgaaattcctaaaagggagtgcattgacttcagttacatcttagtaaaagggtttctctctgtctgacttaggaactagaatcatgtctatgggacaatagcagaggtcccctctttcactaattagctctatatcaacattggagtgctccaagaggaaagtaagacagcctgggtggggagtgggtatgactgagagtagagaagagtccttgttggtatgaccctcacggatccttttaaaatgagctagcagaaatcttctccccttaaagcctacctctcccatttctatccagctactaggaagagccaaagagtggaatgtggggaactgggttaattgcttcaatttccggtactctagagatacacctgaatttaaaatctagatgtcagtttctccgggggctctgtaaaatgtgtatgtgcatgtgcctgtgcatcagtgtgtgaaaaaggagacaagctgtccctacttgcccttggtctgcagttctttgtgccactcgtgttgagtaaggcacagattcatctcagcaactctctgttttggccatcacttgccaccaccaaatgagggcttcgggcaggagtgagccaaatataagggcagtttttatcagtgatgtgcaaatggctccttctcctcttcttgtcttctctttccctcttttactgcccctccaaaatttccacccctggatcttaagactagctttttactccaggctgtcaaggaggaaaaggatattgttaccattaattctgagtaaaagatcaataaattgatgttgggtaatgtgagtcaggaatgattttctcagatgcctgggtgagagaatcaactcatgccattgagggcagcacccatcctcttgaaggcacaaggtaactgcacaccctgcatttcccccaccaaaagagacagacactcttttctcaaggcattttttagaggatcttttaggttttccaagctagcctaaatttcggttaataatctgggcagaggaactctggtgcccatttatcgtgtgttgtttcagaaagtttaaatgtgcatttgaaatattactcagagcaaagttctttgtgatgtttatcatgagtgggacatatcccaaattttcttagctgtttacattgatagtaggtctgtgtattagagtaaaacctagctctggttgattctaaggatttgtgtgtatgtctgtgtgtgttttgttatatattttctgtatattggtggaatatctaaccagagccttaatgtgtctatataaacttgggttatcaggtcgcttggatattctcagagtacatatatttaaatgggaatgttcccattagaacaaaaaagaaatcagatttcagagtaaaactctacctgatacttgaatgtctgttagggagcctgtgggggcaaactgctctctctggggcatgggaaagaattagtggtttgctccagtgctctcctcctgagtacctacaactttgtccagcccactaaagtacatcacccaactctgttcatttagccaacagggcaggcaaaatgttcctcatggtcaggttttaaaaacaaaatcatgggtaaaatgtcaggattgtaattgtgcacccttctggcaaatatttcccattgccgctagtttgtgagtcaaaaaagggggttttcacagtgtatccctgatattagtcatacttttcatttctccctccttctccccactcccttagtgggagatgtgaaagcccagctgggccaatcctgcttttaacagtatccctgcttataaatttctagcaaatgaaactcaaatgacagcttctgctgatgtcatgtgaggcaaaacagaaaccagctggaattgctcctggcagtgttggttctttggcctagtgagagaaccaggtttgttattagaaacaaaatactaacagaaggcttttcagacttttgatcctatgtgcgcccaactgatgatcatatcagaaatgtgtcttctgcagagctaatgatatctaaagtaagaatgtattagaaaagaccaaatgaaatagacatgataccaaagcaaaagatggagagaaaagaatttttcgccagagaggagaccaatgggtgaaaaacattgttggtgctgtttagccttttccactcacttttcccatcaaacttggctaatgttactcaggaagctcagtgattcaattactattcattaaggcttagtgctctcaagctgtttaagtatggctgagaacaactacctccaactggccttaacttaacccagtatactcagactgaaagcaggtttacattccaagaaattgtgcaggactttcagctcatcttctcagcttttcagtaacctggtacttaactgccatttattgtaaacccttagtgctttgtctttatttatagcattctttagatgtggacgtatcacataactgctacttaacaattacagaaacactaacagcaatgatgtgggttacaggctgatggcttcctataggccttcacaggagctgcaggtggagccaggtgtcctatttttagattagtgttcactctttcaaacctcctgcctctaaacctgttgacgaagaagggcacatcctgcaaggtactttgccaagactgtgtggtttaattctcaaaacaatccctcaaggaatgatttatttacccctttctacacatgagaaaacagaacctgaagttacccaagatatatagctaatatgtggtgaagtcggaattagaattcagatctgtttgagttgaaaactcaaattcaggccaatctccctttctgaattcttttgggtatgaacttcctgtgggatatgccataaagtgaaggggaaactgaggaatgatcttgccagttaataaacatgaatttaaaaaattaatacatatgaatacaaatacatttaaaaattcattgtcaaccttgagtcacccagataagtggtaaatgattgctaagcacaaatgtggagtttctgcctttaatacgcagctagtcctctgcactcaattctctggctttccaaacagtcagtcaaaaacaatagattggattccagttaacctaattcttcagtctgcttggtgtcagtttgaggttgacgatagtgagactataggtaagcttatcaccaaaacattgtactatggggagtatagctgagaagccatcattctgcgctctgagatctagtcacttgtcaattaacaagggacctcaaatgctgaattcaatgaattcaagtgcaaatttaagaattctttggtgactgaatctcctgtaattcaagtgggttcatatttccaactttacttcagacatctgtgtattaggacaaccatctacttatttggtttaattttaggaaagaatttaaggtttcctgctgtactaaggcagactattagcttgaaagttatttttcagaatcctgtaaaaaaaaatctagcattttgagcctaacgcagtattttgaataatctgagacttaaagtgtcttccctctagcttttttccattgctctttgctctctttacttatgcaaacaggcttccttatcctctgaggctcattgagccaacacaccagttggaacagaagccatgaaaaagaaatacaacacaggtctaaattcatgatacatgccctgatttattgccatcaaactggaaagaggccaagtgacagaaaatagtgtttactgaggagctttaagctgctctttttaggaagaggggactggaaatggttctcattttaaacactgtctgaaatacagcccaactagaaagtgaatgggatggagatgtcaaaacatagggaaagagtccctgaaatgggttcagatggtcagtcttctctattttctctgttgcaaacttgaggagcagattaaatgtaagggagagtgttttcaccaactggtaaagtcgtagcctgcatctagacattcacaacaaccaggggacccctttattcctgagtccctctcctctcctctgactagggtgatctatataaccggaggagtgttggccagcatttatgcccccaccatctgcaggacagtaatagagtctgaggaacttacattctgcctggggagatgtgacagttatatagtaaatgaaggaaatgcttaaattccaagtgggcgaggcagacaaaaagaacagtaattaaaaggaggaagtgatccctgcatgctagaaaagactttaaggaggataatgcattgaaagaaagaatgagatttagagaagggcgggggcaggtttctgaggtagaaggagtgacttgggcaaagacagaggaaggattgtgggtgaattattcagaggtgacatacctgtatgtgcttgggggacacatatttatttattaagaataaatcaatctgtaataagttcatgttatgatcttataaagatatacagatatatttacttttgctcagatctcacaacgtgatgaggttggcaggaaagttgattcattataacaatgacaatgctgagcttcagaagattaagtggatttatttaggctacaagctagccaggagctgaactaggaccgaaatgacagccccctgactttgactgcaattattctttctctatgcctctctgcccaagattcctttcatttcctaatttagactgggtctggctctagggggtaaagaggtcaggtaagggaggtataggaggacattagcaaaagagagcccggggccagaacgtggagggccggaagttagagaatgagtcctgcaaaacgaatgtcaccccactggtggttaaaggcattcttgggcaaagggtctgcagtgaaaataaacatcagaggcacttatttatttaaatgagattcccactgggtatccatggcctcatgccactgtgtatagagctatgtgggagaacctaccacacaggggaggataaggttctgtgtgattacatactgtctgatatccttaatatacacaagggggagaagactagaggagggttgaggactcttaaaatcctgtcataccgtgatctgtccacagattgtaagggtctatggcaaagtatggtatgaatgaaatggaatctatgtatgaatttgaagttacagaaacagataattttctgtcatctaacatctaagcagctttgccctagaaactcctctaaatatattctaaatatggcttatccttaatttagaatagggagtccaaaaccatgaacagtaagtccctttctcttacctttgtttttactgttttgtgtttttacttaaacattcattttatttatttcagaatagtgtggttttgagcacaaaacagtcagaaaaaaagacctaaaatataccaacttaaaataaaactttggtatctgcgctcccatcaagatctgaagaaatattttcagatgccataaagctaattaaaaacaaaccaagcaactaaaaataccatcaccacatctttttatagctgcctttaatcttgttttaaggctaatgtgaatcaatgaataaatttggagaaattttgtttttccccttaaaaaattatgttcctaaaacaagcatttcctacccagaatgtccgtatgagcaggcatagaaacacatgaaaaataaactaaagcatgtctatttaaaattaattatgatctgaaaaacaaaacaaaacaaaacaaaaacttcatcccagaaaacctttgttaacgttccattcaaaggctattgaacacgtttaatttccttgagggagagtattttgtcatgcggggagaattcttagaagggaaagcctgcaggtagcaatacagacatctctgacagagaaaaataaacagcaggatcaagctgagaccagatttattaaccatttttgataaaatatttggaagaggtacacagcctggtgatttgccctctgaaaaatgccaaggtaatagtcataaatatcggaaatagtttataagtttaggcggataaatagaaagttggttgatacatttgaatgtagtcaaatgcaagaaaattggctgataaatttgtatttagtcaaatgcaaaaagttgtttacagaaaaatgatttatagaggtttgcttctgagcttagtgatgatgcaacaaagggcaaatagacagcgttcattgcagacatcagcctggtgatctatttgggatcaaggatctcaacaaagacctggtcatcatcacaataaaatttcacatcctcccacctccaaggtaagcagcattatgcccactagcttgtgggatgtggaacagagttctagcttcagctcaaggattgagtaaaattggtaaaattggagaaggctcagggaagggcagctaaattaatcaagagagtagagaagcttttgtattaggttagataaaaatagtgagacgttctcagagaaaagattcaagaggacctcttaaaagtagggttatccttactgtatccaaaataaattacattttctcagatttctggtgactaaagtatttcttttgattgctttgtctttcctcttttttttttcccccagaagacaggggtcataggatgaggatgaaagacagagggctaggtgaaaaataccaggtctgaaccaaagagagggctaaacttagagtaaaaaacatcctgttggaaaactgcaatatcaaaagacaaacaccaccaactctgtgcaggctgaatgtgacagtgaatatattctatgtgacaaaacgtaggcctaaaagtcatcataaaacctttctgcaaggttttctaataagagttctaaatcacagaatgtttcgtagtgcccagggcctggctatgaaactctcttaaccctgtgaaatgtgaataatagtagtaaccactgtattaaccaatatctaatcagccagtgagaataatgaagatcaaaattagggaaggaaaataacatttattgaacaattattgcatgccaagtattcatgtaatgttcacagcagccttgcaaaataaatattcctttgcagagttcacaaataagaaaagtgagacatgtggaggctagtaatggaggtaaataatggaagtgagtagaaaactccaagctgtcttggagacaaaaagaggccttttcaaatggccctttttggtcctaattatgctaactgttcagcagaacatttgtagcttagatgcagtcactaccagccctctcttccaaatcatctctttgggttttgcttcagtgtgaaactatcactataaatgagtatttgtttgtcttcacccacctccagctgatcactgctcccaaggctgagaacaatatgtatgtgcaacaacgtgatgaatatctggaaagtttctgcaagatggctaccaggaaaatctctgtgatcaccatcttcggccctgtcaacaacagcaccatgaaaatcgaccactttcagctaggttctcttaaacattttaattatattattgtttttctcatatctaaggtgggacaaactttatggtagaggtacatgggggatccaaaagaaaatgaagatgttcagagggctctttggttgtgataacacaggtcagtttgcctgcttatttaaatagccattccaggatggttctcgtttaagttttaagcactgtaaaaaagaaaaatacgcaaacactctattgtctgaaagtcagtaaggtggaagaaaatgggaaaagtaacacagtgtgggagagaatcagagaggcattcagacactttttctgggtactgagtcttctcgcctgtgagcagccccgtctgatcttcctgcagactctccgctgcaggtgactcatcacagatgggacttgccagactctcggaagtacttgactctggcaagcctgaggaaggaattaaccagaactgagagaagctgttaagataaatgaaaagtcactgaaaatatggactgaactgcacccaagtccttttggagagtagaagaatttggctgaatttagagttttcgcaattttacatatgaatggtgcatgtgagactcatgaggcgtacagcccagtgttggacagctgagatctaactcattgcagttctcctgggaacgttgcaagatttactgtgattagttaagcctcatagtcagaagcccaaaatatgacccacccagtttatttcataattattgcatctctagggctttattttttaaaaagctttttttcttatatgcactttctactgttttgttgttgttcatggtttaactacaaaaaaaaaaaaccttagagtaatcctttatattccatcgtttgcatattctgcatagtttccgtaaaatatatttcatctaaaagcacttgaaagaatataaaatatatttagtaatatataactaattatttgttagtcaacatttaacttcaatacacataacattatcacacagatttttctgacatacgatcttggtgtaattgaagacatactagttatattatgtcacgataatgtcaacttgatttgaatatggtctagccttctaaatcatattttttttattgtggtaagtacacttaacgtgaaatcttccctcttaatacatttttaagtgcacaatacagtattgataactataggtacaatattgtacggcagatctctagagctgattcagggtaaagtatcagttatgcattctctactttaaatagcccaccttcctctgaggtggctacaaaagaaaaataaatagcatcttttccaatgtcccatcataaattattgtggattgatgatttatttttagacatttatcctgcactgtgtgtataatttagggggagaacaagcaaaaaaggaattttcttaaccaaaacaacaataatgatcatacaaacaaaagacacaaaatgaattctggagacagacagatttaaatccagggtcacaatttacttgttgtgtgaccttgggcaagctactcctaagtcttagtttagaagataatcatatctatttcacaggattaaataagatagtatacagaaatgccagtcaggtaataggcactattatgtggtcatcctctgcatcaccatttgatctggtagtcatctggaaatcaatgagctgtcacacttgtcactagagcacctataatggcaaaatacttgttattgctttgtgctgattacagaatgttgacacaagaaccctcacaacagctcatccagatcaggctgcattattattcttggtgataaaactgaagcccaagagactaatactacaaagccacgtatttattggctaactaggattcaaccatttgtttcctggatttttcaaataatagcatgagggcagtgagcttaattacactccagatgtccagaaaggaagtaagtattcaatccagcacaaagactggtgctggctagtgatgaaagccctcacaaaccaggtgttcccagtgtcaaatgtgttacctaccaacactttcacaaagtgttctcattccttatttcagagaagcttggaaaaatcattacatcttccacctcaacttctatatggtcccattataagcatctggtactgccttggcaaatttttagcataatcctactgttttctagacatctggattgaatatgaactgtagaggggctgtgggtcttttttttttttttttctgccttattggaaatcaggtattatgatttgggcattttcctcactgaatggtagccgggacctgattttggggtgggagatcttttattttgtttctcatctaattcctggaaggcctctctttccttgtgtcatgtcccagtttacccttatgggaaaggctgtagcactgtgagccaagactgggagtcggccatgggataaaaagaattggcatgagccatgggctcagtgaaccaaaaaactccagccttgactgactttcagctggaaatctatcagatggccttacttttccttaaaaataaatcaagctctgcctactattccagacttttactgggccttgaaagcaggggcacacatccaactacagtgtgggccgtactcaccagctggtccatcttgctaaaagtatttggacatcactgatgaacctacaaacgccaagaaacttaccttaagattttaggctttcatgtaaataaagttatttatgcttgagcaaattccaatgcctatctggttttgtcagcacagagtatattgcatgtggggtttaaaatggcctaacacataaaggcattctttcttgttagtgatatctaaaatgtcagtctaggataggaatgttgggtgtgtatgtttagtgaatggattacagacaaattttgtcagataggaaaaagttgctggctaaaggcacttcattgcagaatgaaaaaagaagtggggggaaatgcacagcaagcatgtttctttcttagcaatatttagagatgaaaaatattttaacattggcattttatcaccaaattttaagagctagaatacacaggacatttaatagggcaagggaagttttttgataacttctttcaaagaaaggagagtttgagggtaatcaagagaggtagcaaagttcatggaggtggaatatggcaacaaggagagagaaaatgttgatttcttactatctaatgacttcataagtcaatttttaaaatgagaatggtacgccaggtgcagtggctcatgcttgtaatcccaatactttgggaggccgacgtaggctgatcacttgaggccaggagtttgggaacagcctggccaatatggtgaaatcccatctctactaaaaatacaaaaattagctgggcatggtggcagatgcctgtaattccagctatttggggggttgaggcaggagaatttcttgaacctgggaggcagaggttgcagtgagccaagattatgccagtacactctaacctgggtgacaaagtgacactctgtctcaaaataaatagataaataaatcaataaataaacaaaatgagaatgatagtatacaaatcagtctaaaataccctttctgtctgatcctgttgaagagaattgttctttctagagaaacctcagtcatcaggatccacaacaattcaaaaatgctgctttgcctctggggcagtcctgaaaaatagacccttttcccccaacttctcctttcatcagtggtgacagtgcctggcagctgccttctctagaccctgcaacactgagctgggaggagaggcaggatgagtgctcagacttccacacagtggctgtgtgtccccctctgctttgataagtctttacttatcaatcattctgtgccctagagactagagagcctgtctcctaacctactcagtcttcttagtccactgcccttgctgcctccaacatcaagcatatcagtgtcaagaccaatccctgacattccaagggggaaaagtgcctgatatgtcaaatgtacaaaacaagtgtttgaagaatgtagtggagggattggctcttccaattgtagtcatcagataaggtattgaaaatatcagagaattttgaaaagtaggttgatttaatggagggaccttgaaaaatgagtaggttttttttcttttgatagaataatgactagatcaaggtatttttgtttttgtttaatttttcaaagaaatactttttttaaattttcaaagtcaaagctatataaaaaggtgtacacagacaagtcttgtatccttcctgacccctttaccctgctactccctgcacccacaggtaatcatttttgttaattccttatttattcatttagtacttttttagacaaatacaaataaatacctatatatttttctttttatacaaaatatagcatattatatatattgttccacaccttgcttttttcacttaaaatatttctaggagatctttctttatgagtatatagcaatcttccccatttcttatcaaaaaattgtgagattctctcatagtttaaacattttgtccatggacacttggactattttcaatattttgttcttacacatatatcacacatacatagagctatatatgaacaaggttacgattaaattgtgaaattgtgtgtgcatctttccaatacagtctaagaaacaggattgttagactaaatagaaaatgtagtctgagtggatacttcctgatttctctccacacaagttgaatcatgttgcagttccaacaacaatgtttaaatatgtctatttccccagacctctccaattaatgtgtgtaatcaaacttttggatgcttttgaccagtgtaatatgtgaaaaatggtatcagtatagggtagtattgatttgcatttctcatgttgtgagtatgattgaacacattttcatgcttagggagcatttatatttcctttttagtgttctttgcccatttttctattgcgttgtcatctttttcatcccaatgcataggtactctatataaattggaaaaaaattcagactcccacctcccctttctactccaagataatgactcatttgtttaggaatgaggtccaggaatctatattttaaaatgttgctcaggtgattctgatttgctattaggtttgatctagagcagaaggctaggtagaggataagaggtgaagagagggctagaaatgtagtttggcacctgaaattagatttctaataccaagataaagtattcaaactttatatgtaaaccatgtgaagtcactaaatatttctgaatatatttttcaaatatatttataactttaagatttgatggagtcaatctgtaggacagcaattcacttggacaggacacactctttattaataagacaagttgctctttctagagaaaaagtgatcaggaatggccagggtagtcccacctatcaatttaatcaggtcactcatctcacagtggggtagtagataggaaaatgacccactcatagagtaaaaggggagtaagcagatcaattgcaaagtaatttaaacttatccatttccaatcaaaaggaaataagttccaagctggaggccaaggttatcctaactgaaataacctgccatggactgctcagcactcctggcaatgttcttgagaataaaagcaatttagcttctgctggcatctacctcctggcttatgcaaagcacaaccaagagagttttggcccctactgacttcttgaaaagaatcgttatattttaaatgccttacaaatatgttttatttaaaagacctaatgcatgcaaaaccaattttagaaaaaaatatatatgaatgtgttttctcaaattacattagactgtgttgcgggttcacaagatcaaaggaaagtgtgaaggttttatggtgggttttctacacagtcccagaatcactcaccttatctataccttattactgtctttttcatatatctttcttatgggagagttctagtgattaccaaatctttactgaatgctggggttgtatgctaggaactgtgccagcctgaaaggatgtaaaaggtgaccaaaactcagtctctattgttgaattactcatatctagggggaagacagatatgtaaacaactggttgcaatgcaaggtgattagcattattacagaagaatgccaaaatgttgagtgcacaagtgaggtgaagacaggtttcagagacaataagaagtactcatgtggacagcattccaggaagagagggcacatttctagagaccgaaaatagggggctggagcataacatgtggaggaagagttaatagataagtttatactgccataaatgatcttgtatgctatgacaaggatttagattttctcctctgggacagtagctctttgtttttagagtgtataacaactacccaggaaattttttaaatgcagattcctgggcttcaccaccagtaattctgagtcaattgatctggatccaagaattgtaattttaacaagcactcctggtgactgtgatgaaggtggatagtggatcgtacttttacaaactgctagaagagattgggaactttcaaaggaatgcgagaggctaaagtagtccaggcattagtggaattgcctgaacttaggcaagagagggttggaggaggagaatccacggatgtcacaaggaaagcagttacagatggaagctttaagcgtaatgcctagcacacatttggtgtttaatatgttataactgaagctgaattttctgcagtgtcattgctgtctatagtgagtcacgaaaggacaaatacatgaaaaaatttagtaccacctgaatttgactgctgatgtttggggttggaatttttaaagaatagcactctaggcaaatgtcttactactagggccagaccttatcagcacataacagagttcaccttccctgggaatccctcacctcaataatcttaggtccaaatcccagcaaatgggcttgaatctatgaagcatttcagctggatcaggagtatgtagacagtttagagaatgtttcctaaagatttttttcttctggctgggcgtggtagctcatgcctataatcccagcactttggaaggctaaggtgggtgaatcacttgaggtcaagagtgtgagaccagcctggccaacatggtgaaaccccgtctctactaaaaatacaaaaaaaaaaaaaaaaaaaaaaaaattagctgggcatggtggtgcatgcctgtaatcccagctactcaggaggctgaggtggaaggatcacttgaaccgcagaggcagaggttgcaatgagccaagattgcaccactgcactcctgcctgggtgacagagcaagactccatctcaaaaataataataataattttttttaaaaaaagaatttttctttctaagccctgtaatccttacaatcattagtgagcttaaacagagtttggataaatttaacaagaacctgccaagtctatgttgcttttccagactaaagagaacctcaacactgagccctgatttagatagaatgcagagctcaagaaagaccggtggcaggagcaggagctgagacaggatgtagcttcacacatactggcctagagtggactctgtccttctgtagagttgccaccaccctagtctgatgcagtgttgattaggactttcattgttttgctttggcagattctcctactcagcacaaacatgtagatattcctataatctgggagtgcaaaatgttttatttctaatgtttggttgaaatatttcagaaaatattttggttgaaagaaaaccggctttgaaattggtttcttgccatatactagtaaagcaaagtttgcctttaatcttggtcctgggtcctttctacccttgagtgtgaggcattttggcatagcagagagaacactgggtgggagtgaggtaatgtcacctgagtcctaacctcactctatcattaacctgcaatgtgaacttgagcaagtcactcctcctctcagggtctgtgacagattgggttttctgagagacagagtctgagactctgagttttgcctgcaggcagttaacacagaaacaatacttatgaggggtgagagatacaagactggacagggaaaatttgagctgcaatagagttggaccttccaaactgtccactttgagacaaaggggatagcttttatatctatcccctcttttactacatcaaccattgaatgtgagctgtcctatggtaggggtgtgacttggggaaaggtggctcccttctaagtagatcaattgtcagagatctagctgcttatattgacagcaaccttagttgtgaaggtagcaactggacagcacaccacagtgtccactacagtttccttagtttcaaccttaataatgtgatggtgtggagccagataatgtctatattcagttttctattgccataataaggtgaggtaacaaagaccacaaaccttagtggcacatacagtaagcattcatttagtgacaagtttctagggttcagctgatctgggctgggcttggttaggtttgctcatgcatctgcagtcagctacaggttgggtaggaggttctgctgatcttggctgggcttgcacgcatgctgggggtcagtgggctgtcagctaacctgggtagccttggttagaatgagaacagggtaacttggcttgactaaacctccagcaagctggtgtgggcatattctcatggcaatggcagaagcaagaacaatccctaatgtataagcccatttctagcttctgcttgtgtcattgtgctaatatcccattggccaaagcaagtgatatagatgcgctcagagtcaagaggcaggacagctcaacccatttcccataggaagaagctgtagttactgggcataggtatagggtatagctatagggaggggggaagaattggtgttatattaaaaatctactacaatctccaacttccttccatctgagccattcagtgattttgtgactttgtccattaagtagatgctagtggtctaattctggttctaagtaggagcttgaactctgtccaagttattgatttctgaatctagcactcagcacagaaccaattctggacattagtgataaatatttcgttgaatgaacaaaagcaagaatgaatgtatgttgggaattaaaaattgtaatttccaaatacaagataaaatctggtttgtaaagtcttagaatcagaacattagttaagaacattttttaaaaagcagtttttgaatgattttctttattattagtattactattcacaaagtaaaatatgttccttgttaaaatttgaataacataggtatgcagagtaaacaataaaagttttcacttcaccttttcctgtggactttttcctatgtgtatttccaaatgaatgtatcttcttttgtttttatttccttacaaccaggaataaagtcatattatgcattttgttttgcaacttgtttttaatactcaacaagatatatttaaaaatataaatctaataattgtaaattaatttaaattttttctaataacaaaaatgtacatttgaaaaatagtttatatgcatgaggcctatcactttttatgttgcagacagtgcttggttctcatctaggctctcagctccttttcctttggaccacctccatgaagcactgttatgactttggggaggaaaacagattgattctttcccctctcattttgatttgctttggagaaataaagctccttctttatacactttcagcaatcctaatcaaataaaagtaacagttaaattgtaatcatcccctttttattaatgaagagtaatgtctgtggtactcaaattataacatcttatttgcaaaattgtggttgtttttactgtgatatagtattgtagtacagtgttagtcactgggtagtgatgttggtaataagtgataggctctcattggtaattttcctgttatcatatatttgctaacattaattttttcacatttgtttttaatataggggattattttgcagataaaatcttaggtagggttgagagatatactgtgacttgttttagcgggaagaagtaaataaagctcttctgtccttgaaaatgttaaaatgctttcctgacatacaagttgccatgtaaagccactagtatcttgattttcatgcttcccattaatccagtgacaccttctggaaccattctgaattataaggatttatttggggaggctgatgattgaaaaaacatatagtgatttaaaatttccataaattgtcacattttgttttaaactgtgttcacttacaaaatttgcattatgaatagcttgacttcttttggagcccaaatgaaactgtgactaggtttcaacagaaactctatttttctctatagatatgacatgcttactgggtcccaaagttaattctataccaaaaaagaggaacagacacaggttttagactcagaattatgtttaatggaaacagaacttaacaaattgtctgggtcggtccagttccccggtgagttagggtgaagactcactccctgggtgagttgcagtcttctcctaggtatgactcagcagtctccactctcactttgttcctttgttcctgtttgctgtgaacaggatggacagagatggagccttgatcatctatagaagagtagctttcaaaactttattcatgtgtttatttctatatttattaatttactccgaaaacttttgttcaaacacaacgtgagttgaatatataaaactaatgaaggctggtgtgattaggcccaaagccttcacccattcacctcccaatgatttctgccttgccacacccatattcattcacattttatttcccttaagataatgagaagcccatgcgagtggtggatgatgaagacttggtagaccagcgtctcatcagcgagctgaggaaagagtacggaatgacctacaatgacttcttcatggtgctaacagatgtggatctgagagtcaaggtacagtttcttattctgaataatgtagtactatttcttagaatagcaaatctgaattgttttgttaaacagtccattcaatgtacgagtaagcataaattattttataaatgggaaagttttgagatgggccaaattttccatgttgtcctacgaatttgcatccagaaatgtggtctctgacaaagactgagttggagtgacttcccacagcccagctacttgactcagactaaattcttttctaacaacaatgttttacattcataagacactagttaaatagctatgatgtgcgaggtcctggagataaaaggtgaagagtggtctctgccttcaagaaacccatatttaacataggcctatctcagaggggtctagaagtgtgcctcctgatccaatgtggacaagagtttggggttgttttttttttattattttgagacggagtctcaccctgttgcccaggctggagtgcagtggcgtgatctcggctcactgcaagctccaccccccaggttcacgccattctcctgcctcatcctcccgagtagctgggactacagtaagcacccgccaccacacccggctaattttatttttgtatttttagtagagatggggtttcactgtgttagcaaggatggtctcgatctcctgacctcgtgatctgcctgcctcggcctcccaaagtgctgggattacaggcgtgagccaccacgccctgccaaaagtttggggttttacacctagtttctttctatgcttgcggacaaaagttctgaaccatgaaaaactataccatgtaataataacaataacaaaaatagtcactttatcaagtgctttccttatgcctggcactttcttcaaccctttgcaatccttagtctcacacgtctaagataaatgctaacattatttttgtttcacagaggaaaaaacagaggcccagaatggttaagtaactagcccaaggtcatcatgcaattagtgttgaacttcattcccacagaggctggctcccgaacccactgtcttaacaattttggcatactggcactatatcactgaaaatacattttactaaagtttatcttaatacttctttaaagcattccctaaacaatttttaaaacaacttatcaaaatgttcttttaaaattccaggcttctgaaaccatgtgaaatggggaacacaaaaaatgttcatgaaaaagtcattcatataccatgcttgtgtgagaatcttcacgggaaaaaaaggctgtctatgctatcagaatagctgacccaacatgcaacatatttctggatctggagaaatggcatcattagttaattctgcacacatgttgtctcatctctaatgagagaggttgggccagataatctctaaggtccttaccagctctcacattctgtgatttactgaattcccacagagggcagagcttcgagccatgtccagactgctctccagtttatgctgattacgctcagccagcccctaaatccatctcaggttgcttttgtaagtccaggcagctgtgattcaggaatctgaatttcattgtctttaagttggatcccaacttatttctgagaataggtgaacaaaaatgacttaatattaagtgatgtttactcagtaaaacaatccctgggaccacagaacaggccttggtggaaaactactcttattgctcaggttacacacttgaacatgttattccatttagtttcctgtgttaggtacagtgtttctcagttcttctccagttgttagtaaataagaaccagcttagtcccaaaggtagagaggtgaacctaggacttgtatggtgaggaaggcatggaccctttccaataaaaggagcgtagttaagaattacttgtaaaagaggcagttgttttatggactccaactctcaaaacatcagcaaagggtactattgcaggagagcatttatgaagcaatgaatcttctaggctctgatttcaaagatttccccagagctcctctgaattctcacaggttctctatcctctgaatagagagaagaaatgcacttgtacattaaatgcattctgttttttcttaaacagcaatactatgaggtaccaataacaatgaagtctgtgtttgatctgatcgatactttccagtcccgaatcaaagatatggagaagcagaagaaggagggcattgtttgcaaagaggacaaaaagcagtccctggagaacttcctatccaggtacatcacctttggagtcgctaaagaggaaggtgcaaatttgttctgagtgagctcatgaaaatgccaaagaaacacagatcccacaggtgtttacagagagtaatcctccttggagaaaaacctacccatctctggccactgagcttagtcttgtcctgttgaaatgtctctggctacagggctggctggctgcagctccaagcatcaatgttgatttggtgactcaggataggtcttttctctgtttttttttttttcttttctttttttttctctttctttggtacagaatatagaatcctgacctcccaagaaagttaatttactcagtcagtaaatctggagatctctgcatgtagcatttttattttacatatttatttattaggccccttctggttccaaacaggatttggcacactgtgcttgattttccgcttccttccaactctgcaggaaacaacaaaagccccactaagacctcaaaaggagaaatcctcttgacccagtttcacgaatttttcgacactgtcgtttattgaaggccatcttgtggcaaccccagtgtccatgggggaggagcatacccagagaagagtgtaaaaacaactccatctgttacaggacaggggtcccaatccagactccaagagagggttcttggatctcgcgcaagaaagaattcaggacaaatctgcagtgcaaagtgaaagcaagtttactaagaaagtaaaggaatagaagaacagctactccatagacagagcagccccgagggctgctgcttgcccatttttatggttatttcttgatgatatgctaaacaaggggtggattgtttgtgcctctcctttttagaccatatagggtaacttcctgacgttgccatggcgtttgtaaactgtcatggtggtggtgggagtgtagcagtgaggacgaccagaggtcactctcatcgccattttgattttggtggattttggctggcccctttactggaaactgttttatcagcaaggtctttatgacctgtattttgtactgacttcctttttcatcctgtgacttagaatgccttaatcgtctggaaatgcagcccagtagattttagcctcattttacccagctcctatttaagatggagttgctttggtttaaacgcctctgccaaatccacttttctcccttcccctcccctcccccgatgtaggatgaaacttctactgagactttggggccctaggaggtgcaaagctgcagaaaactacacacaacaaacttacagaggtcccagtatcaacaccactccaactatactgtgtggttaaggggttccagaaaccaagcaagcatgtaatacacatttagtgcttgagcctccaagcagaatctttactcatgtctctaaaagcacattctccatatgtgagacagagcattaagaaggatatgattagtaagtggataaaccgaatttctacagatttgtgaggcttgggtcttctgggatgtaacatcatgatatataaagggtacagaacttaccattcatccaagttttgagtctgtaacttactagctatgttgatccttttcaattaacctgcctcaaaaatctctcacccataaaattaaaaacgatagcaagcagctctatctccatccatctccatttcacatagccattatacctgtgaacactttttgtgtgctaatctctgtgccaagcacgtcaccttcattccctagttttacccttacaagaatcccatgagctaaatactgtgactattgtcatgttgcaggagagacaactgaagccaatggagattaagtaactttctctcatcactgagctagtgtcatctctaggaagtaccctgggacaatctgactccccaaatctatcgtcttatcttatgctcctttagaaaatgtgaattattattagttctgaacctaaaggcctagaatttgaagcaaaggaagatactcttaaaaccacagaatttcggccctgaaaggaacccaaggctcttccttcatccaaattctcaatgcagtacaagtatccgtaatggaaacagaaggcacacaccttcataaggacttaaaatcaactcagccgtaggggcagcctccactgagaaagggctctgagcttcacgggacaatggctctttgtctggtctcgggggtattaaaacaccaacttctgatccaagatcatcactccagatgacgataattgaaaagatttatgctaagagcttttcttttgctcttgaggtgcttttcttttttctttttaaggtaaaaattctttagaagtttattttttattttaacagtgataaatatacttcaagttacaaattcaagacctcagttcccaaacttctgaattaggcttcgaaattttattttccaatttataacctagcaaatttttgccatcacttttaagagggctttgaataatgtttgatcttgcttataaacccagtaattaaacaacttcatcatttcacgtaggcattatacatttaatacatttctttcaattatttgaaattaaacaaacaaaatctttcctagtacttaaagatctgtaagttaataagttaattttacaaatacagtgaatctaacgttctctcagatgttctaaaaactgcatacactgtaagatttcaacttacctgcatgcctaaaccaattacttaattacacattctaatttgtagtttcaagttgtcattttattaggccaaattctcttaagcttcacaataatatatttatatacatatacatatataaccagaattatagatatatacaaacatatatataattattactatattactataattttgattctttggaaactttttcttcttaattctaaatcttccagggttagtgatctatcccagtaaactcaggttgcccaccctataaagcagacagttatcatccagttcattgatgttacttaaaaccagagatctgtcgtgagactggcagctacagacatcctcagagattcttctcaccatccctaggtagagtgtctttttataaccactatgtcaagggtttcaaaatttgaaagggaaagctgacattatctcaattttcttcattcacaaaagcttataatactcctgtaggttggttacttaaattttgtatttttttttattctcaagaaagtacaaatattataaagtcttttgtactagatggggtcctaacatatgtaaatgtattttccacctaatgtaagagttttatgggctcttatcttcattactactataggaatatacatcttttatggatattcagagatatatataattacaatttggatgtcccatagcggtgcctgatttgtagtcataactcataaaatcattctgctaataattgtaatttatttgaaggattaaagtggaatagtgtactacttaaggcacaagcaagacaaaatgagtttgattccaggttcctctatttactagctgtgtgaccctgagctaattacttaaacactctgggcttcagttttctcatttgcaaaatgaacatagtaagtgtatttttgtttaagattgttgtgaagggtacattcaatactaaaggtaatgatggcccaggacccagtacaaagcaagtagtcaataaatgctacttattagtagtcctagggtcagttattctggtcctatagagaactttgccatccaggaagagctaccagaaagagatttagtaaatactccagaattgaaacccaggcaaagagaaatgaaaaaaaaaaaaaaaaaaattacagtcctgtaattaaaccagtatccaaatgggaattttccttcaaatttgctgagtggttgatgggtttacacaggctagtttcagctgaccagaccctgaagccagtctagtcttcaacagcactcatttggttcagggtataatcacctttccctgagacagaaaccccaaagagtgggcaaatgcatactaatttgggcatgccagttaagagaagcaaacacattcacagcttgtaaagtttttatttactgggaagctaaagtgacagaaaaacaatttgtctaaaataagggtctgggtcagtttcataactcttgttacatcttttggaagtttccttccgtgtcatgagctgcaaccttgtatcttaatgtgaaggtctgtgggaagctgaaacatgacttaggggaaatgaccttctcttagttgtgtctgggacagggagtctgacatcccatccctctccaatcaggactgcattcagtgtgcacataggtaaacaaaccaaaatagacctcacccaaaatagctccttccaagacaccctacagctctgtgtgaggccaggaaggctagtctggtttggatgctggctagggggccagcgctggtctggcatgcctcctaaggaagcaggagaagtacctgagactgttgtgtttgtgatccgacagcagttactgttccctttcctaagaaaccttggacagtctcagaggctcctttcttgtcctttgtgccagacacattcagctccctgtcctcagtagagattttagtttttctttccctttttaaaaaaaaaaaaaaaaaaaaagcagaggaagtgaatgtaatgtcacagcaagcaatacttggcgagccttgcggcaggcatccattcagaggttgtatttcatcaaactatcattttctcttattcacccaaaccactattccctcaagaggccattttctttggggttgaaaactctcatgttcactcctgatgctagaaggggcacagggatcaaagccatgaataaaattaactggctgtcagctctgtgagtgcaccaacaccctgcggtcacctgcactgaaggcaaaaagcaaaacaccagtgaagatggaagttgagacaacgctatacagttgccccttagatgcataccttctctctttttataccctcttgcagaccctgatagcaccagccaaaatatcagtgtctgagggtagtaggtcggggaaaccgctggacctggagtcagagaagtgtctgtattttggtaatgcctcttagatttactagttgggcaagttattcacttctctaagccttgttttgttatctgcataatggggaaaataatccgcagcctcactgagctctaatgaagaaccatattgcgttggtgaaagtgagctataaaatgatacacaaacctaaggactaagaataggttatttgatggtgccgtgatggataatgtcaacgtctgttaatggataaagttctacacccagaagcctgcagattaagacataatcctctatatccatgttatcatgtggataacttgcattgatagatttgagagtctaatttttgtaacattcctgtgaacaacatactgctgtttttgattttagaaataaggaaggctgggcgcagtggctcacgcctgtaatcccagcactttgggaggccgaggagggcagatcaccaggtcaggagatcgagaccatcctggctaacacagtgaaaccccgtctctactaaatataccaaaaattagccgggtgtggtggcacgcgcctgtagtcccagctactcgggaggatgaggcaggagaatcgcttgaacctgggaggtggaggttgcagtgagccgagttcatgccactgtactccagcctggtgacagagtgagactctgtctcaaaaaaaaaaaaaaaaagaaagaaagaaaagaaaagaaataaggaaaaactgagactttggtgaattgagtgacatgctcaacgacacccaaaaagacaaaagctttttctgctactctactgtgttggaactgtaaaaacagaaactaagtttactatatattctaaaatcttatggttctaggcttaatatcattccactttatagaagtactttgtaagcattggcgcttattaataatagggtacattttagaaattgcatttgcctctggaagaaccactggctactgaggaaggtacatagggtttcgtttttccaggaatcctctttgaacctttaaaccactctcccattttcctttttcctgtcactgtaatctacttaaaatacagttatctttttctactctatctcctttccgtatattcatttcttaaccccctctaaactctagcagtaactccactaagacgagttctcttcagttgtcctctgagtttctcatttccattgctacagtttaatgtacaattttggcctgtcttcattgcatctgagagtttgtctctccccaagtgacctcattaggcattgtgaccacagactcatgcttgacacgtcatgcaaatgccaaagcagaaagactgtgaagttacaacagaaaaactacaggagtgtagcaatgcagtttaatggctttgagaagcatgggacagttctctgtttttttctttttttttttctgggcacagaaaaaaattgctagcctaagtcactctggtttcctacattggtttttattgtttgaagcagtaagcagtaatggtgtcctgctttttttttccaggttccggtggaggaggaggttgctggtgatctctgctcctaacgatgaagactgggcctattcacagcagctctctgccctcagtggtcaggcgtgcaattttggtgagtgggaagccacctcattactgctttcccataccactctcctcctggtcaattctaaaatggaacatagaaccttagatcattcaaaatgattcctagttcagactgttcaggtttccagacacatactctactatattgagtataaagttgcttttagactggagctttagtcaactgtggatttttttttccctcaatattctctcctctctagttcttcttcattcatgtgtttgaaaatatcttctgatttacttttaatgatctgtatcatttatcttcagtttttttttaaattgtctcacttaggtattaccattcacttaggtaatactcgaatatctacttacataccatcactggatactccatagattaaatgtcttttttaaaataggaatggctctgggaataatatattaattgaagcagactatattgcccttctcttaaaaatgatttttatcttcaaaactcagaagacttagtgaaagaattttttttaaaaaaggatttttatctataactgagcactaagaaagtagcaagatctcttaaataaaaccttattttaaagacaagcaggccaaagaaaaacatagtttactgttttttgtagtgaatcgctcagaattttgaaaacgaatatatgctttatttaccaaacatttttattctagtgtcctgagagagctaatgtcattttggatatggatatataggcagtaaaatgaatagtatatagaacttactactaagttcaatgataaatcaaggagatgactacaatttcaaaagtagaagtcatgagtgaaatctcatatgagatatacctctgcagaagaagaattttgagagattcactgggcaggggcaggggcagggggaagtagctaagggcaacaaattaaaaaattctccattagaacatagatgaatcaccattattttgatgcctctattaggaggaagaatcatctactagttacaaaactgtgcttgatttgttttttaaaagggaggagggtaagttttgtaaagcattaacagagccaaggtccttgttatgacctagtatgtgtaaattataagtacattttaattttaagatatgaaataactcaaaggaaggccaaaaccaaactcataatagtaagaacaatagaaaattcagaaatttttatttgtactcctattatcaaggttaataatttaagactttatattaacatataaatttgattgtgctagtattcttaagcacactttaaattatttatagccaccaatgtggccagttaagatagaaattcttacagcagttaagaacctttacaagaaaaatataaataaagccacagtttttaaattttccaaagatgcttttgtagcagctatttggtggtactttatctttaaatctctgcacacagatcctatgtcacattgtgaaagcaaactcttttgtactatacccaaaatgcgaacaagtcatgttcacatttattaattaatgaataattaaattgatgatcttcccttttgaaaacatgactaaccaatatgtagaacagaatagttcacttctctgggaaaagagtaaaggtgaaaaaaaaatttttttgaatagcattttgcctagattttagcttctccttagaagtaccctcccatggcagtgttcacttttctctcctggacaataaacagcaccaacaaccttattattagttccaagttattatcctgactaggttgggactttatttaaaactatgaaagcttgatatgatggcttgacagcccctttgtcctcctattttctttctctggaatctcttcatatccacttcatcttcaaaagaattccaacaagctaccaaggcatgaccttccctcctgtcctgaaactttagcagaggatatgaaggcaagctgtgcttgcttaaatgtcttcccttttaatcctctaaattagtgataaaaacatatcctttaagccactacagttttgtgtgaggaagcagaacaatttcaatttctttaaccatcacaattgatggagtctgtagtcttttctctgaaagttaagttatcctaaaagctgttataaattcagaacactaactagcttagatcagctcagatattttaatgttccaatgaattgcttcatcttttcttttttttgagaccgagtctctgtcacccaagctggagtgcagtggcgcgatctcggctcactgcaacctccgcctcccgggttcaagtgattctcctgtctcaccctcccgagtagctgggactacaggcacgtgccaccacacccagctgattttttttattgttagtagagacggggtttcaccatgttagccagggtggtctctatctcctgacctcgtgatctgcccacctcggcctcccaaagtgctgggattacaggcatgagccgccgcgcccagcatggcttcatcttttcttttcttttttgtcatttagtagaatgagaatcacagttcatcttctttgaggttttgaaagtattttcttccttatggtaaaaatttaaaatggattattcttctcaatcgggttatgctctatattctttttaaatttaagagatttttaattgtcagatatcagggctttgaagtaaaagataacttctaatcctttcctctaatcctatggttttcttttttctctcaggtctgcgccacataaccattctgaagcttttaggcgttggagaggaagttgggggagtgttagaactgttcccaattaatggtaatgtgttgttatcttgaaacagtatgaactagtgttaagttcagttaaattacattaagttatatgcaagcagtgggtgtatctctaaggtgaacaaagttcattgaatcctcctcccacttcatgcatttgtgcatgtgtgcctgtgtgtgcacgggatatgtaggggaaggggtgtggagtacagggactaatattatttctaatataaaccattccaagtaacagtaaaaatatccatttttcttaactaaaataatgctttttgggggtccgtataggtccttatggtttacaaagcattttcttctattttatatcatttaattctcacaatagttttgtgaggcacataggtcatatctcattgattccctttcaacagataaggacatacactaaaaggctcagagaagctgaaagacacatacactaaaaggctcagagaagccgggcatggtggctcacgtctgtaatcctagcactttgggaggccgaggtgggcagaacacttgaggtcaggagttcgaaaccagcctggccaacatggtaaaatccgtctctactaaaaatacaaaaattagccaggcatggtggcatgcgcctgtagtcccagctacctgggaggctgaggtaggacaatcgcttgaacctcggaggtggagattgcggtgagccgagatcacaccactgcactccagcctgggtgacagagcaagactccatctcaaaaacaaaacaaaacaaaacaaaacaaaacaaaacaaaacaaaaaaagactcttgactgaagttttcagaaagcaaatccagtcctttcttccaagaccaagctctttaaataatgtgtgtaaaatacttggcagaatgccggacacagcagacttgaaagtgtcagctccttttctccttcccctctattcttttcactattcacaatagtttaaatattcctctagatcttaacagaattgatattttcacttttaacaatgaaataagctttttatcattaagatgtgtcaaaaggtaagctgtagttacagagaagtaactaagctaattggaaataaacttagaaagataaactatataatccttgttagtgacaaattttaaagaaattagtcttgccaggattaaattaaggaattggttttatactttgtaacattcctacaaaagacacatcgagtgccccaaagtttgaccctaatcgtgttgcagaaagcagggacatttaatttctagtagaaaaagccccagcaaacttctttaattagattttgaactaaagagaagaggctcatgggtcctccctattctcacagtaatttcctcacactttaatgttttcatgggctctgactgtttaatctactaacaataactattccaatgttattctagggagctctgttgttgagcgagaagacgtaccagcccatttggtgaaagacattcgtaactattttcaagtgagcccggagtacttctccatgcttctagtcggaaaagacggaaatgtcaaatcctggtatccttccccaatgtggtccatggtgattgtgtacgatttaattgattcgatgcaacttcggagacaggaaatggcgattcagcagtcactggggatgcgctgcccagaagatgagtatgcaggctatggttaccatagttaccaccaaggataccaggatggttaccaggatgactaccgtcatcatgagagttatcaccatggatacccttactgagcagaaatatgtaaccttagactcagccagtttcctctgcagctgctaaaactacatgtggccagctccattcttccacactgcgtactacatttcctgcctttttctttcagtgtttttctaagactaaataaatagcaaactttcacctattcatgagttattattgaaacctcaaatcataaagacatttaaaagaattgtttttctaactggaggggctctagtgctaaataatagtactgaaaattgatattattttccttttcttatatgaaggaccttatttggcatataaaattttataaaatatgtatttaaagctttttcttattttttgtattaattggtaagtgaaaactctgttaaagatcacaccacaatgttttcaagaaacatctgaaaagataaaacaaagaacaaataacttataatacttacttaaattgacactttttgaaatgccagtctgaaaataattaagatatctctgctttgtatgagtttcttttatgaaacttgataccacgggagtccagtaatattggccacaaaagccagagaaagtaccaagcccagctttgttatcatagccacttcctgccctgcttctgttatttttagtgttttttcagatataaatcggggtccaggaaatcctcaccagaatctggcactgcagccaaaggcgatacttccagagttctagtaggctgctatggaatttctggcatgaaaattcttgacccctcacactttaccccctgtacagcacaggcataccatggagatattacaggatcagttccagaccaccataataaagtggatatcgcaataaagtgagtcacacaaaa

SEQ ID NO: 10 - DNA, 623082 bp, Homo sapiens
cattaggtttcttgcttctcagaagacacctctccttggtctgggagggcttcagacacgggggttggctccgcacaacagcaagcgagctggtgggagtggcgtaaaggtgaacatgggtctcctccactgcgtggtggaggcagcttctttgcatttcttgaaatcacagactcctagaggtaaatgggatgtgagggatcatcaagttcaatcctgcaatttcatacatgaggaaactgaaacccaagcaagccattctgctttgctgtgactcagtttcctgatctgtaaactagggacatgaacacctcctttgcaggctggtgtgaggatttggtgtatgcagtgcttggcttgtagcaggtgctcaggcaatttcattccctttctctgtgcatgccactcccacattctgctaggtttctcttactgaattgaggtgacagggagatttctgcagggatttccaatataatttatttttattattattttattttattttattttttgagatggagtctcgctctatcacccaggctggagtgcagtggggcgatcttggctcattgtaggctttgcttcccgggttcaagcgattctcttgcctcagcctcctgggtagctgggaccacaggcacacaccaccatgcctggctaatttttatatcaatatcatttttgtatgtgcataatgaacaactttatccctggaaccacaaaacctaaatttgaatccttgccttggtactattggggaaaaatatcctcaaattggacagatcgcaggacttcttgggaactcggcttccacatctaactggagaacattggctcccttccctcacagggctggtacagagcttgggtaaaatcatgtacactaaatggcctgcaatgtctaaaatgcccagaaagtggaaggcaccatcctttctgcttatctatgttgtctcttccatgccgtaacatggatttttctgctagaggaacgaggtcttcaggattgagctgtgcatgggagtatgagttggagtttgatctggttctttgagtgagtctgcaagtatgtaaaggccatgagccggtctaattgattcccacctgcaagttatcttcccctttcttttccctttttcctgatttgtgtgagagctgggacttctttcctatgtgttgcttctggtgatgatctatataaccaagagtgagcagctgctgaactggctggaaataatcccagacttactggatgagagcattacaatccgatcctgattcacaagactcagggttgaattccattacagagtcaaatctctggtttatttacaggaaaaaaggggcaatttgatctgatgcatgtgatgagattttttttttgaaaacagcaatggtaattgtgtctttctcatgtacagttaatcgcatcttttaatattttccctctaatgacatttattcttttatctcccaggcatccttagtaaattcatttcttttttctccttaatatgtttattaatcctcaaacatttgttgtgcttcatcagtaaggtcagaggatgaacagaaatttggattttgagcaattaaagccacagccaggtcagattacaaaatataggatttcagtctgctgatggcttcattgcccagcattggttctggggatcaagaacctgggagtgaagaacaattcaaggtcagttttcttcctgactgttggggcattttcagctcactacctggggcattgggggtgtctgaggtacaatcttgctggcttcaatatatgtgtgtcctaagaagcatgttcctgagagaactaatctcagtatctataacaagtcagggtttagaattcaaaagcaattattttagaatcttgttctcttgccaagtcttcttgaagctctaatacctagtttcttcacaggtaagatggaaattagtgacaacattagtaataataatgagaattcacatttattgaatactatgagccagacactgcgctaggcactttgcataaattacctcatttgatcctcatatgaacccaaaaagagaggtgctaattgtgttcctttttaatagatgagagaatctgggcaaagaggaagtaatcaattagcttactcagggacacatggacagtgagaggcagggctggagtgatcatcgtgtaatgaataagccttggattgggagcagagacttggatttcagcctcgattatctccttctaattctgtgactgtggaagtcacccaacttctctgtgtttcagggtctgtttttgggttgtttttgttgttgtttgcttgtaaatggaaaacatgcttggaaaaaatggacttaagtgctattttagctctgacattctggaatactgagaaattctactgagaataaaaagggccactaaagcgaactgaatagaattctctcccatgcagaacactccagatggccttgatttctagcagtgacacctctatgccagtgcctgtgattactttgcagcaaagttcctagcaggctccgagcagttctcagccatctcacactccaagccccttgaacattgccctcagttttgcagtttctcctcatgtgccctgaagcccagactgcacgtaaacaaccagtccaagaacaataattctgcttcttgggattgaggagtgtatcaattttctgtaattctttgtagcagagtgagcatacattatagagttcaagtgttttgaaaataagctatgaagaattgttatctgccaaaagaactggcaatttgtcaacgttcagcagctgcaggactgagtgactctgggcagtgtatgctgtcagtgctgaccccaggaaaggatgagcagaggaggggacaaggaagggagtgctcctcagtctctcaaagagaaaaataatttagctgttggaggtgtgagaggacttttacaagagcctgaaagaagctatgtcaattgtgacacataagtcctaatttgcagcaagatataaaagaaaaatcataaaaacactggtacaactcaatcttatcatcttgacctacctgctgttctcatccagccctaggaactcatttgcttgtatcaacaccaacaaatctcagtatccttgataaactttttactttccttcagcagttttgtagttcatatttcagttgtggttggttgtggcttctcagtaactatagttgtttgaaaaataaaacagaagccttctttttcattttgctaattgatctttcagtggtctctgcttttgaaatagccttttttttctctctctctctttctcctcctccaccttttcctgctttccttctctcctgccactgcctttctcttatatttacaattcttggaagaggttgctcagttgtcattgatctctcaggttaggagtggttggcaagcaggaccagaaccatggacagtgccacatacatgcttgcttctccagatacaccgttctgtttaattaaaatgcatttaatggcatcaccttagggcaagattgaaacctgtagaaaaagtttatatactcatttagaagctacagagctgaaagtggactaatatgtccctcgttgttctaggaaagaaaatgttttattcctaggagcctaacaactccagacaaaatttgtgtcagaaagttgctagctgttagcagggaatgaggatcttgtgacagctggtaagattaaaaaggaagaaaaagccagagttgactttgattggaagttttggggccagagttggggctgtgtattcctcagtggagactagtgagtggtttgcctaggggtcttggtcagcctgcctgagatggagacatctgggcatttataggagttatggatgagaaactggggtacattttgttctcacaggaatagagtatcaaaggacatgcaaatgacatgcaaattggctgccactattttgctgtcattagcttatttagtttacaggatgtcacagagctgggagagtaataatctaagtatcaggaacatcacctagaagtaagggataattcaatagggtagagcacattttcccaaatagccacgattaggggaggccctctgttgaggagtgaaggttgagatcctttgctgctcacaggatctggtcctggaattaatagtaatgtagagagggacagagatcttatgaggttcatgtaacatcagagattcaaaagtattcaaatatgattttgtttattttgtggtatgtggtacatgcaattacataatataaaacttaaaatgtgcaaaagatgttgtgatgtttttattgtcatgcaggaacatttaattttggctatttgaatttgttaaatttgttcttttatatcttggttttgtgtcattttaaaaaggctttgactttaagattataaaagtcataaaattataaaaatacgtattgccatatactttgtctagcacttttatggttttatatttttaaatgttattatgaaaaatttcacgtagctctctctttcctgtttgcagccatctacttctcctacccagaggtaactgtagttataaatttttcgtgaatcctaaaatgcgctatgcacataaaagtatacaactaccatatttctccctctttgtacacaagtaatagcctactgtatacactataatgcaacttttttttcaattaacaaaatgtcttagagataattttatatcagtacacatcaagttgccccattctttacagatttcaaagacttttaggatatgtgattctattcaagctctgtaccagccctgttctgtaagtagacagacattcctgtgttacggatgaagaaaactgatttacaaagaagttctgtgacttgcccaactcttattttctccagtagtaatgggcaggatgcaaacccaggtcctgcggttccagtgctaaagctcttctttcactacacacaaaaattatagtaactattcctctaaaaagctccctctcaactgattctactagaactgaattatccagttttcatttgtctttatttgttccgtatctagattggtagaattttatttcagaatattttacatgtaattccaccatgctcaggcttcccttgttgctaagtcagctgtctgttgaactcattcccctttgtcatatttctctgagtgcttttatgttttttttccctttatctttggtgttctgtgctttcacgatatcacattttaaggcgattttttaaaaattgtattcttcttgggatttgttgggcttcctgaatctatggattggtatcttttatatgttctggaaaatcctctccaaactttgcctctgactcattttctcttctctcctacttttggaactctggttaaacatgttggatttttttcactctactcccttgtctccttgtttttgtaatagattttattggggtataattcacataccatacaatttttaaagcatacaattaggtggtttcttagtatgtccagagttgtaaaaccttcatggcaattaattttagagcttttaatcacctaacaaagaaacctcatgccctttagctatcatatcccaatttctcacctcacctaaccctaaacaaccaccagtctactttccgtctttatatatttcctgttctggacatttaatatgaataaagttatataatatgtgctgttttatgagcagcttctttcacttagcataatgtctttaagattcatccatgtttggatgtatcagtacttccttccttttaatgactgaatactattccattttaaggatataccacattttgtttatccattcatcagttgatgggcatataggtttttttccccctactatttggccatgctgctataaatattcatgtaaaagtttttgtatggacacacgttttcatttctattgggtgtatacctaggagtagaattgctggatcggtaaccatacatttaactttttgaaaatcttctagatggttttccatagtggttgcaccatcttacattcccaccagaaacttatgagggtttttatttcttcacgtcctcaccaaccttgttattatctgactttttgattatagctattcaactgggtataaaattatatcccatggtgatttcagtttgcatttacctgatgattaacaatgctgagcctctttttaaatgtgcaactggcatcttctttggagaaatgtctattccgaattttttgcccattttgactgagttacttggtttcttaaaaattattaaatgtgtttttatgtattttggatataagtttcccatcagatacagtttgcaaatattttctcctattccatgggttgtctctcactttcttgatagtgtcctctgaattaaaaacgtgtttgaagaagcccaatgcctatttttttttttttgaggcagggtcttgctctgtagctcaggctggagtgcagtggcacgatcatggctcactgcagccttgacctcctgggctcaagcagtcttcctgtctcagcctcccaagtggctgggactacaggcatgcaccaccattcccggctaaattttaaattttttgtagagatggcatctcaccatgttgcctgggctggtcttgaactcctgggtttaagtgatcctccctccttggccttccaaagtcctgggatcacaggcatgagccactgtgcttagcctaacttttcttcttttatttcttgcatgtttggtgtcatatctaagaatccattgcctaatccaatgtcatgaagatttacccctatgttttcttataagaattttgtagtcttggctctcacatttagatatttgatccatttcgagttattttttgcatatcatgtgatataagactccaaattcattcttttgcattggccatttggttgacccaacactatttgttgaaaatattattctttccccattgagttgtcacagatccttgttgaaaactaattgatcataaacatatggatttatttttagactctcaattctattctattgatctatatatgtctatccttatgccagcaatacatgatcacaattactgtagctttgtagtatgttttgaaatcaagaagtgtgagtcctccaatttcattcctttttttcaagaggttttgactattctgggtctcttatatatgaattttaagatcatgttgtcaatttctaaaaagaagccatctggaagtttgataaaaattgcactgaaattgtagatcaatttgtgagagtcttgccatcttaacaacataaagtctcctgttctatgaactgggaatgtcttttcatttatttagatcttgatttcttccaacaatgatttatagtttttggagtataagttttgtacttcttttgttaaatttattcctaaatattttattctttttgatggtattttaaatggaattttgtttgtaatttcacttttggattgttcattgctaatgtgtagaaatacaattaattttttatattgattttatattctgcaaccttacagagctcatttatcatttctagaatttttttagtggattccttaggattttctatatttaagatcatatcatctgcgaatatagttttagttcttcctttacaatctggatgtcttttaattcactttctttccttattgctctgtctaggacatctgatacaatgttgaataaaagtggcaaaaccggatacccttttgttgtttctggtcttagggagaaagcatacagttcttgtacccttaagtaggatgctagctgtgggttttttggaggtgccctttagcattttgaggattttcccttccattcataatttgttgaacatttttattttaatcatgaaaggctgttggatgttgctaaatgcgtttgctgcatctattgagataatcatatagtgtttcttttttaattctgttgttatggtataatacattaattatttccatatattaaatatccttcttgtcttctttccatattttccgtcttattattccacttatattttattgtagtgtgtgcctcccaactaaaatatgagcctgatgaaggtagagactgcatcttgcaattgattcttggttttcaggtgggagatctttgtggaacttgaaatatgtgaatccactaaacaaccccctggcaaaataccactaagaataaaggagagaaaaactaagttggattgaggtgtgtatttctgggtagtcactggggctcagtcaccaaggaggtctcttttccttacggacaagtcttcaagcaaataattcaaatttgtgactcagcaaaatgacaaaccatagacttcagagtcactcttggatcgcataaatttccagtgctacattctctagggccacaggccactcatgttcatccctatggtacctggcatgttaagaggataacaattatttgttcattttattaggactgtgtttcatgcactaagcagcgggttaagttccgaggtgatagaaatgcatgaaatatggttcttgcttcaaggagctcagaatcagtggaggtagaagacacttaaaatacgggtgaaagtgctagggtggtggaaacacaggggaggagagaggatgaggcttcctgtagcaagtgaggtctgagtttcccctttctcacctcccctgccgtctcctggtccaagtcaccatcctctgtctcctggaataataataatgtaggaggcttctaactgacctccctgctttttcctgctacctgtgcagtacattttcagtagagcatccagagtggtccttgaaaaacttaagtcatggcccacactgagtgcctatctttccacagttagagccctacttgctgccatggttcacaagttcctacctgatctggtcttctactatgtctctgaccttttttacactttcacttttgataataccactgcacactctaatttccttgctggtctgcaaccgcatctccacctggcatctttctttttttgccttcctcttcctggaaacactcttccccagataacactccttcatgctcccccggcctctgcgcaaagcccttgtgaacaaggccttctctgatgtctctacataaactgaaagactctttctctcactccctctctgcctgaatctgctttatttttctctataccactcattcatttgctgatggtctatctttccagactagaatgtaagttccacaagatcagatatttttgcccacttgattgattattgttactcccattgcctgccgtgtttccttgcacattaaatatttgctgaccaatttaatgcactgacatcctggaggctgagtaggagggacttaggatgaagaactggtctggaatatgaggtagatcgggtgtttcattgaactgaatgatttattttccccacatgtaagggttgatttttggactggatggctgctgatgcccattttcatctactcatctctgaaataccacaacaaaatggcaattttggaacctaaagtggaccaagggtctatgtgaaggacactgacagcttttagcaatctgaaggtgaaggcatgcctgaagacaccacaacacatttccaggcagtgaacatggttcctgaaattgcagctggtcatggaagctacccagtaccagttcggaaagcatctggttctctcatctcaagaacaacccttgcaccaaaccccaaagctcaaatgtaataagatgcttccttagcataatgtattaatagccattggctattgagtgcttcccttgtgccatactcagtgctgggagcttaacacagttctctcttttaatcctttgagttatgtattgatatcatcttcattttatagatgaaaaaacagaagctcaaaaatgtttattatttgcctagggccatgtggctggcaagtagctaaactagtagttttaattccagtctgctagagtctaaagctcatgttcttggtgacattgtatatcctcagatcagcaacctgcaacagatatattacttctgagggtaagaacacatccctgcagtttctctgcttttctgcctttggaaacatggagagaaaggtctggctggagggcccatgaaacagcagggaagaaagagggaggtggagagccacggagacgactggagagaatgctattgtacaggagatgttggactctgtgtatgtatcacaagctaattaggagaacagattaagctgctttggtgtcaaaatagctgtggggaaaacacccttaatagcaggttgcagatgaaagaaaatgaaatgagagagaaatgacgaacattttaaaagaaaacgatcaggctggagggaatggagagaggagaataaaacagtgcatttaaaaattaaagaaattggcatggagtggcttatgcaggtctgatgagtgacagtggaagacagtctagtctcacagtttccttagcctcagtgtttgccatgttcaaagccccacagtttctagggtacaggagacagaagaaggaaggtagtaagcaatttggagtgaatcacccaagagcaacttcagggaccagagtgtgctctttccctgctcattctcagcctggccactccctatggttttctgccctgtttccctcttctcattcctcccagtgagatccctggtcattctatcctctcatggatcaccatcccttagtggatggctctcagacccgggtctccagcccagatggacctcctgaattccctagctgttgcctaccccatcctgcactatctcacctaacacatcaaaaagaaactcatctccctctccatgtgcccgtctcagcacatggtaccaccatccacccaattacctgggccagaaaactgggaattttcttgactttcctctctcatatacccatcagtcagtcactgcattttattgcctctactctctacatatatctctaatcaggtcaacatttctctttgctttactgccactgtcctggccatcacttatctgcacaactgcagtagcccaaagagttgttctgctccattcttcccacttcccaatccattccgcacacagcaacctaagtagtccttccagactaaatctaatcatgtcaccttccttcctaaaaaccttcaatgttccttttcttttctggttatctattgctacataagaaaagaccctaaaacccagtgccttaaaacaaccattttattatattttataatttgtgggttaggaattcaggcaaggctcagctgggtgattattctgttccatggggcatcaacagaggtcagttagtggtatccagctggtaatgggcttcactcacaaatatggcactttgcggggaaggtcagaaggctagcctcagctggggctgtcagctggagctcatacatgtggcccctgcagcatggtggtcttagggtggttggtctttttacatggtggctcatggctccacaggtgtgagctctagggaacaaagtataagctgcatggtgttttatggcctagcctcagaagccatgtagcaccatttccatactactctgttggttgaagcagttacaagcctgctgagtttcaaggagggggatataggcacgacctctcagtgggagaaatgtcaaggaatttccagccatgtcttctgaccaccctcagcgtgaagaatggcctctgaagcatggtatgtgtggcccttcatgggctggctcctgctgatctccttcctgcccaacattcacaaactcattgcattttatgctctaaggctccagccatccttagtaacttacaactctttaagtagtctgagctctcttgagctgttggactcttttctctgtttagaatgaccttctcactctgtattcatttgacaaaattatattcccattcaagtctcagcttaagtgctactccttgtagggagctttctctgaatcagtccaggttagattatttcccaggtggtcaaataatactgattacacagtattgtaactgcttatttaacagcctacatcgctcattaaactgaaagttgttagagggtaagactattattattcatctctttctcagaatttaacacaagatctggcacatatcaatcgctcagtagatgtttattgaatcccttaccctctctgtgtctcagtttcctcatttttaaattgagcaggttggttaacaattggaatggcaactagggttattttatgtgcagttgtctcatttagttacttagcatagaattggaaagaattctgaagttatgactggattcgtcaagaaagaagatggtgatccattagtgacgtctaccatgggcacagcagagggaagaggcagcatgtatgctgtgcatttgatgcacctagattagatcatctccagggcttctctagctgtaaatgtctgtccatagttctgtctatatcacatttatctagaatcccacactgtaagagctgggagtttcccatggtatcactcagtccaatgtcttcattgcatggatgagaaaactaagactcagagggaattaattcacctggatgtcagaacctgagtacagggacagatctaaattgaattaatttgcacttatctaagccaagcagaaatagagggttattatataatagatgctaatctcagctcaatattaattcttcctttacctactctgaggtattagacaacttggcaatagaacaaactgggttttaatcctgggcacaatcactcactagctgtgtgttcttgaggaaattacttgacttttctaaatttcagtttccttttcggtaaattgtggataatatctattgtataggtgagacaattgtagggagagcattttcacatttctggaacacagtaaagactcaaatgttagctattactagtagtagtagtggtagtagtagtatggccacctctggtattatcactaagctttttacctggcttactccctaaagctagcacagagacccaagcagtgtgggttgcaaggcttggggcactggttatctggactctcaggagtgacttggtacttgttaaggaaaatttgaagaatcctattttccccaaccaacaggctttgaaacttaatgcagtgacaaattgtggcttgctcctgggaaatgtttctagaccactatcagagcagccacattttcaatcaggatttctataaaggagaaagggcagctcatctaacaggccagatgcctgatcagatctaaatagttttgtctttgggaaagagagggaagaaatggtaaaagtcaatagaaaacagttgacttcagacatatatatgagatatatatatatatgagatatatatatatatatgagattatatatatgagatatatatgagatatatatgagatatatatatatgagatatatatatgagatatatatatatgagagatatatgagatatatataagagatatatatatatatatgagatatatatatctcaaccagaggggacaggatcagagtcccccaacgtttgaggtttttcaccaaaagctgaatatgaatgaattaaggtgagctgactataaagtttaaaaaataaatagttcgggaaaaatcaatagaaggtgattattgtagatgcctggcatagcagtgaggacttggggagcagcagggaatggttaggtgttaatctcatttggggagggctaatgcatgaagctctctaggcagcaatgacaaatgcacttctaatcatctccatattaaatttagtatcaaggggaggggcacttctctctcttcagtttcacaggaatgtgattaacatggatatgaaaaaagttaaaggaaacagaatttgatttgaacttcatagcctatttcagtgtgaaaattaagatgtatttgtagggttttagtggataagtttacagggattctaaattgtgactgaaccaattctatcttgtacttttcttccttcctttcctgtttcctggaggtgtaagtctgctgagaatcaagcaaaaggaagaaaagagccagcccagccgagggcgagccttgctgggatggggaggaaaaccactttgggaacatagcagtgtgaaggatctcaggctggttgttgacaggggaaacggactccttggtttaccctgaaccctgaatgggcgctctgaatttggaataagagagctggacacaagaaggaggttctctacagtaattctaaatctgatggtcagcagttggctttagtgctgacatgtaataggctgcaattccattgacagtggtccgggtggcacaactctgaattttcttcttcctgaagtcactctccctcaccttgtgagtgaaaggtttaggattcaaaggctgagaacgtaaatggctgcctatgggcatctgcaccttggaaagaactcttcccaccgaacagaaacacaccatcagtgacaatccccagaaggtggtgcagggtttgcatgctaagattctctcccttaattttcacctttttggggcatagtgaaggaaaaaaggggcagaagaaatctggacctcttcccgctttgacagtgaaggcaccagcacctttcctgctttgcattttgaacacaggctgtgctttgtggctgtcatgctatggtgtttcagacttactttttataagaggtacctttttggagtgtgcttacagatttatcccctttagggatgggccttctttgaacatgctctacctttagtaagtaatttaaggaacacagaccattggtctggctacatgttagaaaacagtgtaactaaagggatgggtttaattgggaaattgacccagagctcaatttagcatcgtcatccaggccagacggggtcagggtgacgtcagtgggagtctggctgcctcaggagttggggacagagcttgcttgattaaggtgtttcctgggaaatgaaattaagcctaatgattttcaatgaaagggactgctaattggggaggcagtgctgcttaattgggatcatctgcaggtaattaaaggcttcctcctgatggccttccctgcttatgactctgggaggttaagataatgtgagtgatacagacgttctcagccccctgtgcagaacctctcccttggacagagggccaaggcaacccaactagggtacctttctagtccttggaaaatagtgcttagagtgatgtcttccatagaccctcagaagcctgggcgagtttaggtctctggagcaaagctgctgccagggagtctgtgagccccctggaaaggggagaaaaaggcaatgaggttacatggcatgccaaggaggtgttctgtgttttggtgttgacaccctgacctcagagacctttgtgtcatataattctggctgagtaggacgaaaagttgacaatgtgattttctgtagagataggtgtcctgacccatgtgggaaggaagtcctagtataaaacactctgaattaggagttgagaaaactcatttctagttccaaatgtactgccaactggcattgtgactctttctctttaagccccagttttctcatctataaaatgggaatggttatacctaactatggactatgtaaatatcctttcattctaggtatcgggtaaggcctggggaacgatgaaattttaatctgtgttttacggaactcagtctagtggggaagacagacctgtaaatcaacaattgccatttggtgttacaagccctattgggcaatagaggaagaggtcagtcatcagagaaggcttccgaaagaagggaacatgaagtgagtttttcaagagaagttttatgactggatgatgcagttggagaaagcatgccaggcagagagaacagggtgtgcaaagacacaggcatgcaaaccctagggcacattctggggattgtccctggtggtgcatttctgctgggtgggaaggatgtgcattttggggaaggagaagagaggggaggaaatgaagcagtggcggttacaggcgacggatcacaaaaagccatgtatgctacttagggagcttgcttggactctctctaacaggcagttggtggtcaccaaagagtgttaaatgtaggagtgacaggtcaggactgagttagagaaaagccactgatagaattgtgctctcaggccgggcacagtggctcacacttgtaatcccagcactgtgggaggctgaggtgggctgatcatctgaggtcaggagttcaaggccagcttggccaggatggcgaaaccctgtctctactaaaaatacaaaaattagtcaggcatgtcgcatgcctgtagtcccagctacttgggaggctgaaccaggaaaattgcttgaacctgggaggcagaggctgcagtgagctgatatcgcgccactgcactccagcctaggcgacagagaaagactccgtctcaaaaaaaaaaaaaaaaaaaaaaagaggtgtgctctcaatctgggagctggattgaagaggcaagaggcagggacactgccaggaaagttcagaaggcaggaggtgagtccctaaattcaggcaaaggcagtgggaacagatgaggaaacaatttgagtttgtatcatgagttgcattgtttgctcgtgtatatttttaagcttctgagaactctggaatcacaagcttcattatagcccctttgttcacacttctttacctgctctaaccccacactctgaagagagaggctccgggatctgactttccaaaggaaactttggtgaggctttggactccccacccagtttcatcggtaagaggagtgagataggaccagaatttggggcctctggcctccccaggaggcttaggaaagagaggtctggcaacaggcaggaacccagcccagctcttgagtttcagcggcttttgaaaaacatgtgatgaaaagcagccgagactggaagcacaaaggtgagctggagccgtgggtaattgcagctttcactgggactgccatctcatgttctctcctttcatacctggcagtttgggtaataggcagagcattcatgttgcaatggataaggtagggtcccatttccaattttttttgaaaagctgttcccaagagttgggtcaccttaaagactcagtatcaactgttggtgccaatgcagactcttgggactaaagctattaccttctaaccccatcaaaaagcatcttcagtgttgaagttttttgaagtgttcagctatgattctctataaagtgcctctttgaatagcttctgtgcagagtatgagttaatggggctgagataaactaggtggggtatttcttgcctttccatctgaaatcttaactgatccacacctcctcttttctttttttccttttttctttttttttttttttgagatggagtcttgctctgtcgctcaggttggagtgcagtggtgcgatctcggctcactgcaacctctgcctcctgggttcaagtgattctcctgcctcagcttcccgagtagctgggattacaggggcccatcactatgcccagctaatttttgtatttttagtagagacagggtttcaccatgttggccaggctggcctcgaactccttacctcaagtgatctgcccacctcggcttcctaaagtgctgggattacaggcgtgagccaccacgcctggccctcttcttaactcttacagcactgactatctgtatcacccctcagcaaagaatgccctaggccgagattgaaatgtatgtgtgtgttcatgggaaaaggactgcttgggtacattttcagaattctcattccaaagagcaagttcaattcctttcaatttgttttgtttccatttgaagtcctcggttaaaagaaccggattagaacaaaagtgtgaaagggccttttcctctgtggaaaccacaggttgacctgccttttccctccagcccctagagggcaggagcctgtgttttctccacattgctgggtggagtgaagcacccattagttctttaggacaaactttacaccattgaccacgtaaaactgatccacccagggtgtgtgagtttgtcttattacctttgtacactcttgctggatgaatgaattaatgtactttattctaggaaagtgtttcccaaaagggaaacataggagctgtgctataagatttatgcccacacatcttctccaagcttttgaaagagctgtcctacataagcaccttctcactgagcttcagataaagcccagcctcttcaccatggcccagcctctgtggactctgtggcttcatctggctctgctgtccccgttcttgttctgtttcagctacacaaaccacttgtcataatcccactccagcaacacagcacagatggttactttgactgggaggttcttttcctccacgtccagttaattcctagtcatcttttagctggccctggggaggccttctctgacccctaatctacattaggttccctatctattctctgtcatcaacccccatactcttatatccattattaaaacgtgtccttccatatttatgtgtgagattattggcttagccattctccatgtctagactctaaactcacatgggctgcaccttcttctgtcttagtcgccactaaattatagtgccctgtacagggcctggcatatagtgggtgcttaacatgtatctttgaggaagtgaataagatgttgactcttagttcagtgtagcagccaaggcggccagaactgggaagcattagctacggtgcaaacaagcctaggtcgggcccatcctaggagcaatgatggccacaatgcttctagaactttcctgcctttacccagtaggggctattggagcagagcaaagaggctcgtgccagcatctcaatgcttctgactcagtagtagttctgtatttgcttctctcatcctttgactcctgaagtacccttggtacttttttctgtctttgaatggtttgctggtctgatgggctgggagccagtatggggagggaggagggatgagcttgtttggccagattggaggctggcaaaacagttttcttagcagggtgtctgttgatgaaatacctagagccagttgtgagaggttattaatctcaattaaatctgattatgacatgattggatttgggaagagactgtccaagtcaagcctggccctcttgacgtttactcaatggcaggatcatatcacacagactggtgtccacaacggacagaaggagaacctctgatacctccaggaaagagggtctgggtgtcatggatattcaggtccccagccccagaaggcttcacagattgtaggggtctaactgctgctggctttttgttgagatatgacattcattttgggaagtttattaatcactacaattatggaattattacttgaaaaatgccactttcattatcttcacaggaaggaggtattggtagaggacttggtcctcagcattaagccagaagagcaagctggcaccagtaacttcccaggtcctgctgaaggcccgatggattcctgaagagacaggagtattgacctgacctggtgggctgctaagggctccagctgttgaaaaccatggctcagcctgctgttatcataggaaacaatgaatgggtcgtgagcttgtgggccagactggctgggccaactgtgaaactattaggtgccagcctggactcagaactgcagagggctggggagccattagctactgagtgctagaaaaatgttaacagatgaatccttgcctttgtacagaacatgtgcctgaaagtacaggtgaaaatcaaataggtccaaggtgaacaatagacttatgtgttataacggagtctgttttcagagaacaggaaagatcacaaaaatttaacatatttaagcatttaaacattattgataatagtgtggtaatgcgttatgcgtctggccttgtagaaatttttcattcattgttatctcctttctcactctcttttcttttggttatttatacttaaaaattattttactttcgggccgggtgcggtggctgacgtctgtaatcccagcactttgggagtccgaggagggcggatcatgaggtcaggagatcgagaccatcctggctaacatggtgaaaccctgtctttaccaaaaatacaaaaaaattagccgggtgttgtggcgggcacctgtagtcccagctactcgggaggctgaggcaggagaatggcgtgaacctgggaggcggagcttgcagtgagccgagattgcactaccgcactccagcctgggcgacagagcaaaactccgtctcaaaaaaaaaaaaaaaattattttactatcattttagtgggattttcagagggagaagagacaaatgcttgtggtcaaatttttgaaaaatatttttgttctttttcaaaattaaacatgtagttgactggcttaggtccagcaagtactattctgcttttgtatcatcaaggaaacttcatctttttctaaactgtacagtgcttatatgctgtttttcctctagtaataggtctttggttttatccccctataatctaatattaaagaatttgtaaaaataaggaacaacacacaaatatagtaaagctaacaaaactgaactgctgtttggggaacaaggccacccagtaataacttgaaatctttgtccattagttaggaaagtctacctttggagaacaaagaacagattagaaatgacaatgtataagatacaaaagttagatgtggacattaagggctgttagtagacaaaactaatgaggtttcctattgtgcttctccccacctgccttcactccagtgtgtctgcaggactccagcaacccactagctcgagctcctttcatccttcagcacccagcccagacagttctgccactgaaaaccttctctctttgatcctggcaaggcaaattgctctgcagatactttgctcttgctttgtttttcaaatccttatggtggtttccaaatgtccttctgtgaactggtgctaagctgtgataaaatttcactggtctttagaaaaattagaaaaataaggaaatgtaaactgtgtatttgtgtgtgttgtgggtacacacatggtgtgaaatgccaactctttttttctggtgaggagtggccttcattatgaaactgtcctttatttttattcttagataataaggaaatgtctttcacaaaatagtgatgttagtatattgtagacaaacaaatgtttgcttggcaaaataacaggttgtaaacatcagaagccaagctcagaattagggtactagaatgtcacatgggagcagtcattgcaataaaccacctgatacagttaggctgagtccccacccaaatctcatcttgaattgtagctcccataatccccatgtgtcatgggagggacccagtgggaggtgattgaatcatgggggtgggtctttcccttgctgttcttgtgatagtgaataagtctcatgagatctgatggttttataaagggcagttccctccacacactgtcttgcctgccaccatgtaagacgtgcctttgctcctcctttaccttctgccatggttgtgaggcctccccagccatgttgaactgtgaatccattaacctttttttctttataaattactcagtctcaggtgtgtttttattagcagcatgagaacagactattacaccacctatggaattagctacatcttttgcacttagtctttgcctttcttacagcaaatatctctgtcacgaattctcgttcctatgctgagtgtgtagggtcttcagaagacactcagcacacccctggaaattaatggatgaatggatcacattccctggctgctgggttaagcttatgagcttgctttcaaggggttggaattacttgtatgggactcaggtcttgctgttaatatcattgttgtgtatttggtgccaggacacttccctgcctttccattcctcctgcagcttttatagggaggccagccccagcttggcagcatcccagggaccaaaattcttctagtacttcctcttccttcctcctcagcgtaacccacatccttcccttgcctctcccacttaagggatttccctaagggaccctgtttgattcatcaccacatctttactctcttctggcaacaagcccaatgcctggaacagagtaggcactcagtcaatgtctatagaatgaatagtaaagaatcacgcctagaaatttcacagtacatataatttgcaggtgcctccatgctttcatcatttactagaaaaaacaatgaacattgagaactttgtaaatcacaaatcctaagaaattcatggatgaccttgtgtaagaatttgtgaacctcttaaaattatgtgaaaaatcttatgtatggttgatgaatgtgcatttttctggggaaaataattttcatgactacacctttaaaaggttaagagccatcaaaaaaatgaggcttggacctatgcacaaatacacctgaatatacattctaagatgggaagtgctgtatcgatacaagaaattgttattattgtcttcgggagtcttgctttgggatacctgaccttctgccctgaccacatttttttgttgttgccatcctttcttggaaactctatagctttgggctctagcattttaccactggaaatgaagcctggaattttagagtcagagtcaccgagcttactacatgaacctaaagctccaggtgactcagaaagatttttaggttaataactaactggattggatagagtgttttgtttcacaaacatgatcataatttgctcttatttacttttaaattataaatgattattcagtagtttttccacctttttaaatgggctcttgaaaacattgctttaatgaaatataaaacttaaaagcagctgtggtgttggtatgtaatgattgaagtgtaattaagagttgtaattattcccaattaggcatttggaatgccaaagtaggagccctaatcagctcaatgtgcaagggaggatcagacttgaaacaaggacagggtatggggtggggaggggttgacttagggacccccaagcattgaattgaagaggtctggtcatgggatggcccatctagggatggattcctcatgtgtggtgggatggtagagggaaggaaggccccagccttctcaggtttaaggaggaaagaaagccctgctcaagggaaggtgcttctaatgaatgttcccctggacttctgagccttaattactccagaattactctggaataacttccttcccttatgaaaatgtaagtcacttgagggcataacagggaccagaaactccatcctctatagcccacagggacaccatgacctggtgtcatctccaaggatgccagctttccctactcccacaattttgtgctgccttaccctcacctgccttccccaagactccactagaaacctttccccactttcttttcacagttaatatgacaagggttctgtattaccatggcccttgggcctcccatgggcccaaaggagtaggaaactccattacctacctgtccttcctctaggaaacttggtgtagatcagaaaatgtggtggtgacttcccacttctgctctggttatgagtcttcctggggacaagggaggccgcagaatcttttcctgctgttagctcatgaatgaacccaacttatgacttgatgacatggaattaacatgggcagcaatggcttaatgcctgtatcatttggcttgtgaggatggtcctgctgatgttgttatttcccttgagcccttctcctggatgacactggtgcctggaccagggtagagcaggaggcaagtctgagaaatggcatgcctgacagacccatcagctgggagtgcaggcacatgtcacagagccatggtgggatatggcttgaaagatcccttacaaccagctcacactagtggactttgacacttgggttttatttaccaatgtgggttagtatgggctcactggaggattttgaataaaggagggacctggccagagttgggctttggaagatttgtcaggcatcctgtttaggggtgtcgataggtgcggggagcctggaagcagggagatgtactggagaccgctgttcagtccagggagtggtggtgatgaactgggagcaggctggcctgggaatggcatgggagggccgtgggctgaaaggtcgatgggtagggtgtggggaatagcaatagaggagcccaggtgcctagaaggatggcacaggggagtaaggaggagggggccaggcagaaaagtcagggttgggatattttgaacttggataattggaaggattaaaagagagagagagagagatatgtgagactatttgggaatgagagcaggaagagactgagtttgggatgaatcatattgtttgagagaatgtccaaccagcatgaggagtatgggagctgggttggagcatctgggttgggagagagcagagtgaaaatgcaagaggatgaggaccaagtcctttgcatgggggcggggctgcctgtgtgaacccagagccagaaaagagccaggggaaaaacagttctgctggccaagctgatggctttcttgggaccttcatccttaaggactggagcagcttgggttgggtctgtggactcactgtgactctggtctgttgagggtattaaaggaggctcccgtgctggttagtaggctctgaccccagaactgggcagatctgagttctaatcccattgtacacttctagctgtacagcattggctaacttacttaaccttctggatgtcaattttcttgtttgtaaaataagacctgcctcataggtcttgcagctaatatttactgagcacctttggtgccttaagcatggtgggtttacagagataagatgtgacacatctctgccttcaagccattcaccacttagaggagagagagacagaacaccaaacacaataaaatgtggtgggtgctacagagcctggaccagggagggttaggaacttgtgggagggtcatcaaaactggactcgtgtgtgtgtgtgtgtgtgtgtgtatgcgcgtgtgcgcatgcacatttgtgtgtcaggggtgggagagtgcgtgtgtgtgtgcatgtgtgcgtgcacatgtgtgtatcaggggtgagagaggaagttttctggagggaatgttgcagataaattttgaaggtaaggccaaatgcttctcaaccttggctgcccacaaggaaccacctgggagtcagggctccaccttgaccaccttgaccaattaaatcaggatctcggagtgggggttgaggggtgggttggatagggtccggtcattggtatgattttaaggcatgcttgtgattctcatgtgcagctaagatggaaaacaactgaattagccaaagggggaatggggaagagaaagtgaatcccaccagaaagtgttgtgtatgaaatctcagaggggcaagaggaaaagattcagagggactgcacaaattcatttagtatgtggttttaaaaactggagttcgtagtttgttagtgagtcatgaaactgatttaccatgtcatgacctgctttaaaaaacaaatagaatggatggaattgaaaatatcagggcacacagtacatagtaaagatcactgtttccagaaacttttgtctcacaaacacatgtggtgtgtaccctgggccctgcaaatgtacctcttgccctgggcacagtcacaggcttctgggaatgccagctcagctggactgagtgcaggagttgggtggtgatggggaggtgatgaggactgggctgcgaaaggcacttgggctctgtccctaggagagggtggagcctttgaagggtttttaacagacagcaacaaggtcacctctgcatttcagagccatccctcacctgcagtgcagtctgcagcgggaagagaggctgtggctgcgcaatggcctcaagggaggtgatcgggtgtgactggcagcagctcagggaaggagtggaggggacacaacaggaggacactggggctgatggatggaccttgacctctgccctcatctttccattattattattattattattattattattattatcattattattattattattatttttgagacagagacttgctctgtcacccaggctggagtgtggtggtgtgatctcggcttattgcaacctccgcctcccaggttcaagtgattcttctgcctcagcctcctgagtagctgggattacaggagactgccaccacacccagctaatttttgtatttttttagtagagacggggtttcaccatgttggtcaggctggtctcaaattcctgacctcaaatgatccgcctgccttggcctcccaaagtgttggaattacaggcgtgagccactgtgcccagcctgtctttgccttattgctctttctgtgtctagtccctcagtctctagccaaggcacagacagtacctccggccaatcacaagggcttcattcatgaccttggtagcatttttctctcatctctctacccgctttctgtctccatctggggagttcagcatcacttcaatgactcaagcaggaggggaagaaacctccggaatctttctttaaaggaaggctttttttttgggcttcctgctcccctagatgcaaaaatagcagaacagatgtaactaatgctttaagagaaaatttcctttgagctgatatcaaacatgaatgttgggccctgatggggatgttcagaaagttctaggttggaaaacactccattttatctcatttaaggatgggtgctctgtgggctgtctcttatcagcaggatttgtggggactttgtggtgctagaggctcagatgaggggtgggagcagtcaagctacaaccttcctctgcatatccctcctgggctacgttctggggataaaagaagagtaacaggcagcacctgctgtgaggacacttgtggtgagtgagtggcaccaccagccaccgtgagccacctcctacagcccctccccacctgggccaccctggcccccttgctgttcctgccatacccaccactgccttaggggttttatttctgctcttccctctgcttggaatagtcctcccccagatcttcacaaatgtctctgctcacatgccacccttcctgcaggtggtcttttctgaccaccaagatacatttttcttccaactttttaaaatttgagccagggtcttgctctgttgcccaggctggagtgcagtggtgtgtccctggttcactacagcctcaaactcccgggctcaagcaatcttctcacttcagcctcctcagtagctaagactaagggtacatgccaccatgcctggttaattaaaaaattttttttttttgtagaaatgagataacactatgttacccaggctggtctggaactcctcctagcttcccaaagtgttgggatcacaggtgtgagccaccatgcccagcctcttcccaaactttttctctctcatcttgctttaattttctttaattgccctggcccctacctgaaataatccatttgttagtttttggtggccttttccctcaactagagggcgagttccatgaaggcagggaccatgtctgtccaggtctgcctcgttcactgctgtgtcccttgtgctggaacatgtgcacgtgcagtgcatgtggcatgaggcaactggtgctgaataaatatttctttaatgaatgggtggtagatgtgggtgtcactgatgcattgacacattcattctgcattcaaccatgtgtgaaacaccctgcttgctggtgaaggaggtttaggaagcttggttcacgtcctggagcttttgtgggagacagccacttgcggtgtgacaccacatggttttgtacccaagtatcttcccctggggctgtgatatggtttggttctgggtccccacccaaatctcatctcaaattgtaatccccgtaacctccatgtgtcaagggagggacctggtggtaggtgattagatcatgggggtggtttcccccatgctgttcttgcgatagtgagtgagttctcatgagacctgatggttttataagtgtttgacagttcctccatcacatgctctctctcacctgccaccatgtaagacgtgcctactttcccttccgccatgattgtaagtttcctgacgcctccctagacatgcggaactgtgagtcaattaaatctcttttctttataaattacccagtctcaggcagctctttatagcagtgtgaaaatgaactcatacaggctgagactttgctcagaaggcaccctacttcccttggggcttccagatgggttttagtggtttgtcctgggggactgacaataggggtccaggtccatgctgaaatcaatacgtaagttctgtccgaataggcactgtggttttgtaagcacatgtaccaccaggctcagatctgggactcagctgtgccccactccttgctcctgcagcctatgtcacagcctccttcccgtgtgttctcaatgcctccctcctctgcactgaggctgaaatctccacttcctttctttgtttcctctgtcatcctttcagctggattttaggctgataggagtttcaggtcataaactcagaggtgtattgtgtctcattttctgtaaatctgagtccctatcctaccaggctggcagaaacttgggctcagtcattcttgagtactgcctctcctcaggcagtgccaagggcttgggaaggctctgccattggccactgagctgccgtctttccagccacatggtcccctaggtccgagttctgctgtttcttcccacactagggccttgagcctcctgtccagtctgcctactgcgtagggatggttattcccactgcacacttacaccatgtgtgtttacaaagagaaacaggaggccttgtccctgccctcagagatcaacctgtgtagctgcaagtcacaaagctccacatgtaaaaaggacaggcagtagatcatgtgttaaaaagaccaaagatggccaggtgaggtggctcatgcctgtaatcccagcactttaggaggccgaggcaggcagatcacgaggtcaggagatcaagaccatcctggccaacatggtgaaaccccgtctctactaaaaatacaaaaattagctgggcatggtggcgcgtgtctataatcccagctacttggaaggctgaggcaggagaatcgcttgaacccaggaggtggaggttcagtgagttgagtcgcgccactgcactccagcctggtgacagagtgagactccgtctcaaaaaaaaaaaaaaaaaaaaaaagaccaaagactccagcagttgggaggaaagcaagggtggggagggttggagagatgctggacggctccttgcagggagaaaatggtaaacctgcatttggagagtgggctgacttgagggtttttgtgtgggggttggggagttttgtatgagggatggagagaacttaatccccatcccccatacaaaacccagccatccagctccgcagccaatatgaggtgaatttgctgaaagaaagaaccaacgtgacctattgaactctgaagaacttgaaaagtgtgcttggctatttctgcatcagtattctcccccctgctgccagccaggcctgacaaagttgggtttgagatgctgcatctctggatggctttgcctctctttaaaacagtgtgtggctttgaaatgtaatataacaagttcgcctgtcacaggcctgagcagttcctcagctgtcgcccccagctctgcttctgctgcaaaggggccacattagaatccaaccccggagaaaatgaatctggagtttgtggaagacggcaggtgctttttatagctttcaatggattttgagtggtgcacagaactgacaaaccacctctcgaggcaacagctcctctggacacagtgttttgaaaaggattcatttccacttaaatgatggcattttaagtatttttttccacattctgtaccccctgtcttcctttttcttttctgtaggaagagtgtaatgtgaattaaaattgcctgggaaagtctaggcataaatattaaaatgtttggatgctggttaaaggaaatttatgtttacaatttccctctgttgcagaagcttgcttttatttttagcggaggttcttatccctgacttcagaagatgttcttcttggtgtttctccctctttctctataatccctctgtcctgttctgccacatctctgtgtctggtggtcttgggaacaagtgcccatcatctacaaagcaggggagcaacattctaatggccatagggcctgtaagtaagcaaatattggaaagggaagctgctgcacctccagctgacggtcatcacaaggacacagagctgagggtagggggaggcctctgagttttcatccagattgtaaggtgaaatttcttgaattttaaatgtaggtaactaaaaaacaaccccactatgtggctgaataaaacacactcatcagatccagtcctgaggctaccagttggcagcctctgccatagatgcattaggccagttatggcaacttatcacacagcgataagcccaaattacccgccagcataaggagttctctcggcgcttgcagacctgcttggccggcagctgcctctttagggacagttttagtttgaaagagtaaccttgtggcatagaagaaagagcctcagctctcgtacttttgttcaagttctgcaacttccggggccaagtgaccttgagcaaatttcttgaacctcatgggtcttattcctctaatcttttaaataagaaaaattatatctgaattacctactaggttttgttcgaggcaaaaaggatcacatcagtaaccatgactggaaaagtgccgataccaattgctgttcttgttttgtgtggccagcatgtggtgggaaggaactgtgaacttgaaaagatgcctactccatgcctgtccaagttcccgcctggttcttagttctggcctaacccctagggaagtgaggctttctgtctgtagcaacatgatttcccaaagccatcctggcacagaccacagaaggcagagcagggacgggcaggcaggaagcaggagcacctcggatcctgccccacctcacaaggctctgtggctcagagtatcttgaagaactgcgtctttaccagtttgtttaaatagaacatttaaacacagaaacatgatttaggatagtgtttcccaaactgctgttctaaggcatactactctctaggaagttgaaggagaggagaacaggatttcatactcagctaagctgggaaacatcgcattaaaattaaacaggtttctttcttgcaggatggtgagttcttttttttcttacgcgaatgcatactgtgaggtaagagttcactgtattttcaaacttttacttacaagctctcattggcatttcattaagaggcagtttgtgtaatgttgacctaggttagctcatgcatttcttctctccacagaattttgttgcatgccacttgagtactgggggataaatgagccaaagcagacctagtcttgggtctgccctcctcacattgacagtctagtgggggaggcaagcaataaaccaagtaagcacaaacttagtgtagagtcatggcaggagaaagcctgtgtgggagaggagtgtggcgctctgggggatctgcccctctgtgtgggtgtcctggagggagggaacactttgaaggatgcagaggcctgagccaaccaggagaggccagagccaggaggtgtgggtggacagaagcctgtgtggccagagccctgggagtgagggctggggatgtgcgtgggaggctggagagacagcagggcttggccacaggaaggattttggcatttatcctgggggtagtgggatatccagaatctctctttggagggagaggggaggcagagcaagagcactgtttttgtttggattttggggtggcttgtcagggaactgatggagattatgggggaggcactaaagcctccctaagccatgacttggtgtggccattggctgacatctttgggctgctggggtgactggggaatgtctgcacaagagatgccccctttttgctgccccagctgcaggatgcctttacagatggagcacatagatgacaaataagcactggctgtctagagcagcactgaatgttttgctctgtcttattacgtgacctgtgggtacagtcagctttccacgcagaggtactgtttcccgggaaggatgctcctgcctgctgggaaactagcactggggcagccaggtcacagtatggtttttcttgcccctgtttgctctggaatcaagaatgtgttgattgtgtctccctgaggactaatatccccctgaatttcatgttactcagccagtgcagcatggaatgccctccatgtgttcaaacttcattccaaaaatatttattgaatgtcttgccaagcatgggagataggagaatgaacaagatgggcaagatccctgctcttacccagctcttctgctagtgggagagagaccatgaaacaagattgtcaaagttgaagggtttgggcccctacctagttcagggggcttcagggaaggcttccagaggaaatgctatctagggtgaataatgagtatgcactagccaggtgaaatgaggggtgagagaagagtgcccggagaaaaaggaagaacagacagttctagaggtgagagaatggggcttgtgcaagagtgagggtaggctgggtgcggaggctcacgcctgtaatcccagcactttgggaggccaaggcaggtgggttatctgaggtcagtagtttgagaccagcctgaccaacatggtgaaaccctgtctctattaaaaatacaaaaaaattagccgggcatggtggcgggagcctgtaatcccagctactcgggaggctgaggcagaagaattgcttgaacctgggaggcagaggttgcagtgagccaagattatgccactgcattccaacctgggtggcagagcaagactgtctcaaaaaaaaaaaatgtaaagagggattcagtgtggctgcagcatgggtgcagggtgaggtgaggaaactttgtaagatttccactttccttgctctcctggagaatgtgtgggggcgtcctgagtagtcttggtggcaattgtccagtgcagtcatcctgagcacactaagtcctattcacagcaaactaagatgtacttctcagcccactgcactcacaggtcaagtaacaagacagagcaaaacattcagtactgctctaaacagccattgtttgtcattctatgtgctccatctgtaaaggcctcctgcaactggggcagcaaagaggcggctcccttgtgcagacgttccccagccgccccagcagcccaaagatgtcaggcaatataacaatgtcaggcaatacggcctatatgaggggggtgtgacactgctgatgtcagaagtcacaggaagtaattattgcaaactcttagagcatacttactgctaagaagcctttgtatggatgtcctgagccctgcacccatgaattgacgtaactgtaacgacaagggacggctttttgtcatttaacgaaaggaatgggggatagcagagatatatcggctgcagtgacctttcacggtaagcagagaaatgccagtgttgaaacaattatctcaagtgcccgcgggtaccagcttcctgttgataacatgtggtgctaattacattgaagaatttagggcagatattgtgtctagaattaattggcctgcagaaaggctgagcctggctcaggaccagaagcaaagatgtcagcctctttcagcgccaaatgtgtggggcagcttcgccttctggcttcctcctctcgtgacttgggatgaggttcctctctcctccagtcactgtgctttattgcactctcttaaccttttcagtgaaccaaaaatttgactggtcaaccactcaccccttcttctgtttatagtcttccagacctgcaggggaggaatcagtggccagttaatcaaaatactctgtgtggaaaaggtcagcatggtggggtccctgcaatatatttccctagaatgggaggtgttagcattctgcctctgcatgcctttccgtattacccaagtcgaaccctgtagtcaggaaattgcatcagtcttgtgggttcctgatggctatgattttaatgagagaggaacggtgccaagtctgatcaagttgttctttcctcctactggaccactgttattgggaaaggtgggcagtggtgctgggagatgctcaatgatttccctgctgtgagcacccagtccctcctctggactctcttctttcataacagctaattacaagtgtaagtgctgatgacaatattaattagccttcagctgggctgctttgcgccaggccctgtgccaagcatttcacatgcattgtctcagggaatctctgttacagccttgtgagtttattatgcttctttgtgagacagggaaacagaagcccagaaagtgtaactaacatgctcaggccacccagctagtaagcaggagccaggacttgaactcagagtttgactccagagtcactttgtttcagtcgcctatccccaccagatcctgaattccataaggacagggatggcggcatgctgttttgttcgccctgtgccttcgctcctaatataagccaaatacaaagggtgggggtgctcacaaggcacttgctaagtaaataaatgaacttaacacccaaaccttgtatgagtgtgagagcaggagaagcagtctggaatcaggttcacactctttcacccgcttttgtgtgttttacagatagggtctggagggatggcgtgagggcccaggcatagtgctggtgagtggtttgctgttcttaaagaatccagtgggctgggagtggtggttcacgcctgtaatcccagcactttgggaggccaaggcgggcggatcatgaggtcagggatttgagaccagcctggccaacatggtgaaaccctgtctctattaaaaatacataaattagccgggtgtggtggcacgcacctgtagtcccagctacttgggaggctgacacaggagaatcgcttgaacccaggaggcagaggttgcagtgagtctagactgtgccattgcatgctagcctgggccatagaacaagactccatctcaaaaaaaaaaaaagaaaaaaaagaaaaatccagtgaaagctgctgtggttgtcaaggtaaactcacttctgagaaataaagacattgttgccattgaaggtaattgtgggccatttggtatcattttttattttcccaaatctttagcattgaaaactctaatccgtaatagtcagctaactgaaaatagaagaaaactctagacatcttcatttacctttcagtcctttagagacttagagaattttgttctccaagtgagtgctgggatggggtgggggcagggtgcacctgcaagtgtctgcattactgaacttggcacattgattttctgcagtgaacgtctcttatttttatcatagaaagctatttcatttagaaaaatttaaattatataaacaaaacagaaagacaagaagagtatagtaaattaaagtccctcaaaaacccacaacccagagctaaccagtagataatttggtgaacatctttccagcattcatgtgtatataaaatacaattttaaagagagtaaaatactgtaaatactgttttgcaatctgctcccctctttcctcatttaatatactgtggagatctttccatatcaatggaaatgtgatatgaatatgacactatattattctttttaatggctgtataggacactattgtgtggctgtttcatgattaatccatcccttataatgtacatttatccacattcatgtggcactataattatccatttaatcatttgtctctccctctatgctgtgagctcattgaaaacagggacacagctaaacccatgggcatacaataggtgtcctataaatgtttgcatgtatagatggatggatgagtgagtgagaaggagaggaagaggctttgttttgtcattgctgtggatggtttctgactcaacctgtctgagtgacagcctattaacccagggctgcaggaggcattttggtgattatatagctggagggcccttgttcttttggtgccatgagtttaaatcctagtgccatgaggaagtatttctgacaccaatcagattaattcctgatcttcctgaagggaagtccttggtttcttgaccctgtgggttactttccatgcagctgtagcctctcttctgctcatctctttcaaaggcacattggctgtgcaggggaaaatgcctcttacacatttcaggaaactggaattggctttttgtggggagttgagggacagtgtcagggataatggctattcctctctctctctctctctctctctctctcatgttttagaattctgagctggatgcttgaccccattccaggggtgcagaatgtgctgaaaagtaaaaagaaaagaaaacctccaagctcactaagtgaaaataaaattaacatcctagaggcctgcttctggggacagtgaaaggtagagtcaagctgggattcttaacctgggacacagtagtgggaggcacacagatggccttcacagggtccatagctattgctagattctcacagtgttttgagactccaaatatgtttagagcctctgtttataaaggaaaagcaaagtaagtacccgaacctcattttccttatctataaaatggagcaatagctactatcttacagaattgggtgaggattgataaaatacgatatttagagtgcatgattcaggggcatgggaaatggctgctattactgatgcttacggggtaatgcagcatgactttctttgctccatgggtgactgtctagtccagcatcgctgtgcgtgagtgtgtgtgcgtgtaatgggctacaaccagagatgtgctttagcagttgctgtggtctaaatgtttgtggcctccccccgccccccaccccagttcatatgctgaaacctaattcccagtgtagtgttattaggaactgagaccttggggaggtgattaagtcatgagggtggagccctcatgaatggaattactgccctgataaaagagggccgggagcttggttgccctttctgctgtgtgggaacagatggaagataccatcaatgaagaaccgtcaccaggcaccgaatctgctggcaccttgatcttggacttccccagcctccggaactgtgagcaatacatttctgttgtttacctattactcagtctagggtattttgctacagcagcccaaatggattaagacagcagccttgctctgacagagtgttggtcccatggaccagagagagacagagagaaagattggagcccaggtagaggttgtctcattgtcccgatgtgagccttgcagtgctgaggatggaagaggacagaagaaaagaggaaaagctcgttgggacttggtgaatagaggtggagttgagagagaggatcaagagaaaagggggtagtggtggagaggtttgcgggaagaattcagtttactcctattgggtttgaggagaggtagactagtggaaatctagcaaaaatacaggtctcagaaacataatcactttgaacccctttagttctttatttgcatgagttttagtttaaggagatttctggtagagggagaacctggagcagagggagaaggaagggtgatggaaggaatgccctagtgtcccagcccagtccctaaatgtgatggtgaaaaggcttaaggagagaagctgaagttgccatttttgcaaaggaccccataagttatggagttgctgaaggatgccctgtcccatacgacagagtgatgcagagtcagggaaaggggatttttcacttgggtatagaaggcagaatgaatctgtaagcactggaggtgtcaggagaggcacattttttttttttttttttttttttgagatagagtctcactctgttgcccaggctagagtgcagtggcacaatctcggctcactgcaacctccacctcctgggttaaagtgattcttctgcctcagcctcctgagtagctgggataacaggcgtgagccagcatgcccagctaatttttgtatttttagtagagatggggtttcaccatgttggccaggctggccttgaactcctgacctcagatgatccaaccaccttggcctcccaaagtgctgagattactggtgtgagccaccgtgccccaccaggagaggcacttttggagtggatgttggcatatgttgatgtatttgtgatgggtactgtcagaagcaacagaaatgagactctcttgttgagtgtgggggagaatgtagataaggcagagggaagacatggctgatcctgcatcgtgatcacagatgatagatggacttatgagcctgtaagagacactccttggggaatgttaggagatggaggatctccaaggaccggataaggcaagagtagggaatctgtttttaaggtcaacatgccttcatttccatctacaggctggagagaccagggaatttttggataatgaaagtagctatctgaatgttggattcaaggaaactcaattcaagagtctgtggactcaactgataattttttccccagctttcagtatcagagagatctttgggtctctctctctgtctctgtctctctctctctctctcccctccctccttctctccctccctccctccctccccaaccctctccagcaagaatctgcatctcagagctgggtcctagcaaagaaaagccagcaaatcaaaagaactaaagttcttgattagaattccagttttttcaagcccactactgaagacccatctcttgggacctcatcacctcgcagtttgctctggtgtgagtgttcctttgtaaggtgactctgtgcatagaaatgtctagaagccctctgttgagaaggggccgttcatttcccagcctaccacatgatgcttgagctccagaaggcctcctgggcagagccgcctggtcaactctgagatccactgagtctgtttcaacaactgtcaccaatttccaacaactcaggggctcaactttgagcctgcggctagattcttgggtctcctctttcattctctcagtgtatccaccttttgctctcacccacccatgaggctagttctcactttccattgtcttctgtgattactccccaccttccccaaaaaggaataagacgtggttccaggtgggcagatttttcaacttttaggccagagatgaggcatgggcttgtcaggtcccagtctctctctctcttttcgttttctttttttttaaacttaaaaaaaattatttaatttttaaattttgcgggtacatactaggtatatatatttatggggtacataagatgttttgatacaaatatgcaatgcataataatcacatcatggagaatgggctatccatcccctcaagcattcctttgtgttacacacaatccaattatactcttttggttatttaaaaatgtgcaattaagttattattgactatagtcaccctgttgtgctatcaaatagtaggtcttattcattctttctatttttttttttgaatccatcagccatctccacccctatctctttttggtcacaccatacctggtgcccagtgtctgctgggactctcacacctgtctcccagtcctcctgggcagaaccccctgctctcaccctcctcacctttgaactgatgccccattgccacagggccctgggctttgctgggtggcagtggatgctcacatgaccatcttctgttgtaacacctaatagattccacatcttccctaaacctctttatggtgtcaaatgccaccacttaatggtaataggttctacatgcacctaatgccgtcaaggaatttatttatttcacagaaaaaacttttctactttaacaactttttttggatggagatattttaagattgtattataaacttccttgcctttatgatcagagtattgattatattagtaggaacaatttttattaatcctgtggtaagatatatgtatttccctccgtctcaaaatttgtgttgcatggagctgggcttttctagttctgcacctgctcattttcactctccttccacgccagtctgcatttggcagtcacgtctcatgccttgccctctcatttttacttctttactcttttaaaaaatgttggtgcaggctgggcgtggtggctcatgcctgtaatcccagcactttgggaggctgaggcgggcagatcacgaggtcaggagatcgagaccatcctagctaacacagtgaaaccccgtctctaccaaaaaaaaaaaaaaaaaaaaaaaagaaaaaattagccgggcgtggtggcgggtgcctgtagtcccagctactcgggaggctgaggcaggaaaatggcgtgaacccaggaggcggagcttgcagtgagccaagattgctccactgcactccagcctgggtgacagagcaagactccatctcaaaaaaaaaaaaaaaaaaaaaaaaatgttggtgcagtgcagtggctcacacctgtaatcctagcactttgagaagccgaggcaggcagatcacttgaggtcaggagtttgagaccagcctggccaacatggtgaaactttgtctctactaaaaatgcaaaaattagccgggtgtgatggcgtactcctgcagtcccagctgcctgggggactgaggcacgagaatctcttgaactcaggaggccgaggttgcagtgagctgagatcgcaccactgcgctatagcctgggtgacagagtgagactctgtctcaaaaaaaaaaaaaaagtttaaaattttctgattgtatcacgaggtcaggagttcaagcctgaccaagatggtgaaaccccgtctctactaaaaatacaaaaaattagccgggcgtggtggtgggcacctgtaatcccagctactcgggaggctgaggcagataattgcttgaacctgggaggcggaggttgcagtgagctgagatcgtgccattgcactccagcctggggaacagagagaaactccatctcaaaaaaaaaaaaaattttttttctgattgtaataaacaaacttacctagaaaatagaaagatacaaacaaatatggagaagaaaatacaaacaagtatgaagaataagcatttttccatctagttctcccctcctcccttcctcattacacatatgtatgaaaattcaatcatactgaatatatattaatatatatttcatattattgagctattttacaaaatgattgaatagagttttatcataagatgtacaattttaatttacctcatctctcatgatttaacattcaggcaatttgaatttttaaaactaattaaatttatgatgaatatttgtgggtattttatccttatttttaatttttttaaaagatacatgctctgatgtgagattaattgatcacattctagagttttgcttgtttttttttaagcccaatttcatcgaccataccaattgttgctgatagcagcatccctcctcttctcatacattgcttgtgagagtttaaaatggtataacctctttagaaaacagtttggcagtgtcttccaaagtcgtcttaccatatgacccactcctaggtactaacacaagaagagaggaaatatatgtccacagaaagacttttacataaatgctaatagcagctttactgtaatagacaaaaattagaagaaacccaaatttcatcattggataaataaactgcaatgtattcatagaatggaatactactcagcaataaagagcaatcaactatttttatgtgcaacaacatagatgaattccaaaatcattttgctgcatgagagaaaccagacaaaaaaggagaatatactgtgtgattccgtttatataaagcttgaaaaaatgcaaactaatctagagtgacagaaagcatagcaatcgttgtctagggatggaagagtgggaagaagtggtggagagggtttacaacggggctcaaggaatattttgggtgatgaatatgtttcctatctggattgtggtgatggtttcataggggtacatatatatatcagaatttatcaaataatacacttatgtatagtttattatatgccaattatattttgataaagctagttcttaaaaagatattgttacacttgggcattcgttttctaggaaagtagtagttaatattccaaccaggagtgtgtaaatcccttctcaccagattgatgctattaagttttattatttttaagcatctgtgatcaatcaaataggtaaaaaactgatatacatattaaggctattaacccttatgcttatgtttatttcatatacctttcctccagtttatggttttaatttttatggagaatttgtgatacacagaaattgtaaaaagttataaggttaaatcaattgagcatttcttttatgtttttctgccttcctaatgtacaacttttaattttggaaaaaggattagtcaagtatcttaaaatttctttttaaacaagagtgaatgaggctgcagtgtggaactgtgattttttttcccacatagtagtatgtgtgagtttggtgacaactgtttaagccctttcaagatcattgttttctaagcttattgtgttgaggtacccattttagtgttaaaaaattgtagggctccatatgatagtgattatacttttagggtctgttgatggagaatatataatgacccaaaactcctacacattcagttgctttaaaaaatgaatttgcctaagccaatgtctagaagggtttttctgatgttattctagtggttttatggtttcaggtcttagatttaagtctttgatctatcttgagttgatttttgtataaggtgagatatgaggatccagtttccttcttctgtatgtggcttgccgatgatcccagcaccatttgttgaataggatgtcctttccccactttacgtttttgtttgctttgtcaaagatcagttggctgtaagtatttggctttatttctgggctctctatttatttctgggtacatattggtctgtgtgcctatttttataccagtactatgctgttttggtgactatggccttataggatagtttgaagtcgggtagtgtgatgactccagatttgttctttttgcttagtctttctttggctatacaggctcttttttggttccatatgaattttaggattgttttttctagttctgtgaagaatgataatggtattttgacgggaattgcattgaatgtagattgcttttggcagtatggtcattttcataatattaattctacccatccctgagcatgggatgtgtttccatttgtttgtgtcacttatgatttctttcagtggtatttcatagttttcctttagaagtctttcacctctttggttaggtatattcctaagtattttatttttttgcaactattgtaaaagcggttgggttcttgatttgattctcagcttggttgctgttggtgtataggagtgctactgatctgtgtacattgattttgtatcctgaaactttactgaattcattcatcagatctaggagctttctggaggagtctttagggctttctaggtatacaatcacatcatcagcaaacagcaacagtttgacttcctctttactgatttggatgctctgtatttctttctcttgtctgattgctctgtctaggactttcagtactatgttgaatagaagtggtgaaaatgggcatccttgtcttgttcccattctcaaggagagtgctttcaagttttcctggttcaatgtaatgttagctgtgagtttgtcatagatggcttttattatcttaaggtatgtcccttctatgcagatttttgctgagggtcttaatcataaagggatgctgaattttgtcaactgcttcatgaccaagaacccaaaagcaaatgcaacaaaaacaaagataaataagtgagacttaattaaactaaaaagcttctgcacagcaaaagaaataatcagcagagtaaacagacaactcacagagtagaagaaaatcttcacaaactatgcatctaacaaaggagtgatatccagaatctacaaggaactcaaagaaatcagcaataaacaagcaaataatgtaatcaaaagtggactaaggacatgaacagatgattctcaagatatacagatggccagcaaacatatgaaaaaattctcaacatcactaatgatcagggaaatacaaatcaaaaccacaatgcaatgccacctcactcctgcaagaatggccataattaaaaaaataaaaaaaatacatgctggtgtggatgtggtaaaaagggaacacttttacactgctggtgggaatataaactagtacaaccactatggaaaacagtatggagattttttaaggaactaaaaatagatttaccattttatccagcaatcccactactggtcatctacccagagaaaaagaagtcattatatgaaaaagacatttgcacactcatgtttatagcagcacaattcacagttgcaaaaatatggaaccagcccaaatgcccatcaatcaatgagtggatacaggaaacgtggtatatacatatcgtggaatactactcagccataaaaaggaataaaataattgttgctgcatttgcaacaatctggatggagttggagaccattattcttttctttcttttttttaaattatactttaagttctgggatacatgtgcagaacgtgcaggtttgttaaataggtatacgcgtgccatggtggtttgctgtacccatcaacctgtcacctacattaggtatttctcccagtgctatctctcccctagcccccaccccctgacaggccccagtgtgtgatgttcccctccctgtgtccatgtgttctcattgttcaatccccacttttgagtgagaacatgcagtatttggttttctgttcctgtattagtttgctaagaatgatggtttccagcttcatccatctccctgcaaaggacattaactcatcctttttatggctgcatagtattctgtggtgtataatgtatatgtgccacattttctttatccagtctatcattgatggccatttgggttagttccaagtctttgctattatgaatagtgctgcaataaacgtaagtgtgcatgtgtctttatagtagaatgatttataatcctttgggtatatacccagtaatggggttgctgggtcaaaaggcatttctggttctagatccttaaggaatcgctacactgtcttccacgatggttgaactaatttacaatcccaccaacagtgtaaaagtgttcctatttctccacgtcctctccagcatctgttgtttcctgacttttttaatgatcgccattttaactggcatgagctggtacctcattgtggttttgatttgcatttctctaatgaccagtgatgatgagctttgtttttcagatgtttgttgaccacaaaaatgtcttcctttgagaagtgtctgttcatatcctttgcccactttttgatggggttgttttttccttgtaaatttgtttaagttccttgtagattctggatattagctctttgtcagatgggtagattgcaaaaattttctcccattctgtaggttgcctgttcactctgatgatagtttcttttgctgtgcagaagctctttagtttaattagatcccattgtcaattttggcttttgttgccattgcttttggtgttttagtcatgaagtctttgcctatgcctatgtcctgaatggcattgcctaggttttcttctaggatttttatagttttaggtctcatgtttaagtttttaatccatcttgagttaatttttgtataaggtgtaaggaaggggtccagtttcagttttctgcctatggctagccagttttcccaacaccatttattaaatagggaatcctttcctcattgcttgtttttgtcaggtttgctaaaggtcagatagttgtagatgtgtggtgttatatctgaggcttctgttctgttccattggtctatgtatctgttttggtaccagtaccatgctgttttggttgctgtagccttgtagtatagtttgaagtcaggtagcatgatgcttccagctttgttctttttgcttagaattgtcttggctatacgggctctttttttgttccatatgaaatttaaagtagttttttccaattctgtgaagaaagtcaatggtagcttgatggggatagcattgaatccataaattactttgggcagtatggccattttcacaatattgattcttcctatccatgagcatggaatgttttcccatttgtttatgtcctctcttatttccttgagcagtggtttgtagtgctccttgaagaggtccttcatatcccttgtaagttgtattcctaggtattttattcactttgtagcaattgtggatgggcattcactcatgatttagctctctgtttgcctattattggtgtataggaatgactgtgctttctgcatattaattttgtatcctgaaactttgctgaagttgcttatcagcttaaggagattttgggctgagacaatggggttttctaaatatacaatcatgtcatctgcagacagagacaatttgacttcctctcttcctatgtgaataccctttatttccttctcttgcctgattgccctggccagaacttccaacactatgttgaataagaatggtgagagagggcattcttgtcttgtgctggttttcaaagggagtggttccaggttttgtccattcagtatgatattggttgtgggtttgtcataaatagctcttattattttgagatatgtcccattaatacctggtttattgagtttttagcatgaaggggtgttgaattttatcgaaggccttttctgcatctattgagataatcatgtaatcatgtagtttttgtcattggtcctgctggatttggtttaccagtattttcctgaggattttcacattgatgttcatcagggatattggcctgaaattttcttttttttgttgtgtctctgccaggttttggtatcaggatgatgctggcttcataaaatgagttagggaggattccctctttttcttttcttttctttcttttttttttttggttatactttaagttctagggtgcatgtgcacaatgtgcaggtttgttacatatgtatacatgttccatgttggtgtgctgcacccattaactcatcatttacattacgtatatctcctaatgctatccctcctccttcccccaccccacaacaggcccccgtgtgtagtgttccccaccctgtgtccaagtgttctcattgttcaattcctgcctgtgagtgagaacatgcagtatttggttttctgtccttgcgatagtttgctgagaatgatggtttccagcttcatccatgtccctacaaaggacatgaactcatccttttttatggctgcatagtattccatggtgtatatgtgccacattttcttaatccagtctatcattgatggacatttgggttggttccaagtctttgctattgtgaatagtgctgcaataaacatatgtgtgcatgtgtctttatagcagcatgctttataatcctttgggtatataccccagtaatgggatggctcggtcaaatggtatttctagttctagatccctgaggaatcgtcacactgtcttccacaatggttgaactagtttacagtcccaccaacagtgtaaaagtgttcctatttctccacatcctctccagcacctgttgtttcctgactttttaatgattgccattctaactggtgtgaaatggtatctcattgtggttttgatttgcatttctctgatggcctgtgatgatgagcattttttcttgtgtctgttggctgcataaatgtcttcttttgagaagtgtctgttcatatccttcgcccactttttgatggggttgtttgattttttcttgtaaatttgtttaagttctttgtagattctggatattagccctttgtcagatgagtagattgcaaaaattttctcccattctgtaggttgcctgttcactctgatggtagtttcttctactgtgcagagctctttagtttaattagatcccatttgtcaattttggcttttgttgccattgcttttggtgttgtagacatgaagtccttgcccatgcctatgtcctgaatggtattgcctaggttttcttctagcatttttgtggttttaggtctgacatttaagtctttaatccatcttgaattaatttttgtataaggtgtaaggaagggatccagtttcagctttctacatatggctagccagttttccagcaccatttattaaataggattccctctttttctattgtttggaatagtttcagaaggaatggtaccagctcctctttgtacctctggtagaattcgcctgtgaatccatctggtgctgggctttttttggttggtaggctattaattactgcctcattttcagaacttgttattcgtctattcagggattcgacttctttctggtttagtcttgggagggtgtaggtgtccaggaatttatccatttcttctagattttctagtttatttgcatagatgtgtttatagtattctctgatagtagtttgtatttctgtgggatcagaggtgatatcccctttatcattttgtattgtgtctatttgattcttctctcatttcttctttattaatctggctagtggtctatctattttgttaatcttttccaaaaaccatctcctggattcattgattttttgaagggtatttcgtgtctccatctccttcagttctgctctgattttatttatttcttgtcttttgctaagttttgaatttgtttgctcttgcttctctagttcttttaattgtgatgttagggtgtcgattttatatctttcccgctttctcctgtgggcatttagtgctataaatttccctctaaacactgctttagctgtgtcccagagattctggtatgttgtgtttcttctcattggtttcaaagaacttatttattcctgccttaatttcattatttactcagtagtcattcaggagcaggttgttcagtttccatgtagttgtgcagttttgagtgagttccttaatcctgagttctagtttgattgcactgtggtctgagagactgtttggtatgatttctattattttgcatttgctgaggagtgttttacttccaattatgtggtcaattttagaataagtgtgatgtgttgctgacaagaatgtatattctgttgatttggagtggagagttctgtagatgtctattaggtctgcttggtccagagctgagttcaagtcctgaatatccttgttagttttctgtctcattgatctgtctaatattgacagtggggtgttaaagtctcccactattattgtgtggcagtctaagtcttttcttaggttggagaccattattctaagtgaagtaactcaggaatgggaaaccaaatttcctatgttttcacttataagtgggagctaagctatgaggatgcaaaggcataagaaggatacagtggactttggggtcttatggggaagggcgggagtgggatgagggataaaagaagacacactgagtacagtgtagtgataggtgcatcaaaatctcagaaatcaccactaaagaacttacccgtttcccaaaaatctattgaaataaaaaaatttaaaaaatgaatttgcattgtaataatcaccacagcacttatacacattttgggaaatggggtacctatgtgtgaaatacatattctgtctacaaatttggtgtgcttgaggatgcttgatcccctgtaataatttcaaggcctttcaggtttgggaacccacaatgggaaccacacctttcaaggtagagctgagactcagatattttcccttttctgaaagctgtcccttcctttagactactttcagctgcgaattgtggggatgtgggtttggggcttccaggaagcctgaatatggtgtaagtcggagtattagcaggctttaaaaaacttttgtctccaacctacctttttcagttatgaaggagcatcttattgaagagtcctgagagtgggtgaaaaagatattaattatactcttctcattttctttccaaatgggaatgtctttacccggaataatcagcatatggctttttccttgttcctttgccattttctctcaggggactggaagcatgcctgcttaaatgagataacatgtgaactgcccagcacagggcctggctatagttcatgctcaacaaatctttgttcttctctccttccttcttctatttgatagcaggttccaagctcacatgcaaattgagcattgatctcacagcaaatatgttttggcttagtgatgagtccactgaaaaggagagagagagttatttaaattattgaaacaccttaatccataagttcacataaatgttgttttgaactaatagttttaggcacttaggctcctgtgttccatcttataggtggttaatgtctcctggtgttacataccaggcgaaatctctcttgctgtcacatactttaaaaattcaggcgtttgaaattttctttttgttaaacttgcagtggagtattggattccttggttcatttaaaaaaaaaagccctttatcaaaatgttaagtttggttaatttgcataaaatatttcttctgcaatttactctctattacttttgaagcacagattgcctctgctgcagtgtggagtgcttgtgatggcactcaagctattagggtgttcaattctaggaatgaacaagtctcaggtttgaagctcaaggagacaaattggaatcatgtctcactttcttgggtgatctgagctgatttgaaggaggaaagaaagaaaaggaagccaggcttgcaaagagagggttcaaaggcctaggctgaaagtatacaaaggtgtggatagaacctgggatcagttttgtgctcacatgttctcagggagcagaggaagaggaagaaaagccttgggggtgtctccagaagaagctcagtgacaaatctaatgggcatttgtagccagattcccctgctttccattagcccagaatcaactctacattcaaacagggaatcagagtagctggtggatatcaatgctgaaggaaataaacaagcttcagcacagcaagcaggctgttgggaaaccagaggccgagagactttcctggggcctgagtgacaggagccctgatggttctgcctttgcccagagacacccacctcaaatctgggtttgatgctttctatgcaaggcagcagaggggagcctttctgcacttactgacaacccctcctttaaggcgaagctactcagcctgaaaaacactgacattcacaaatagcagatgggtgggccataattaggcggtcgctggctcctctcactccacttttcttagaaaggggaaaactcacagaaaagtgggggagggttccctgctggggagaggtctttcctttgcacacaagagtttcttcttgactcaccctaggcttttctctgaaagttcaggaaaagctaacgttagtagcagcaaatttggtgaaaggtgggattcatgtgcaaggagatggggttatatttagacctgtgtaattaaagatccatttatgtctgagcatccttaaacagacaaatataaaactcatgaataccaaattctatttgggtaactggctggaagcacacacacacttgcacatacgcacactctaagcttgtctctgtctattcacgtagaaataaaggccaccacccgtcttggctcagggctaatgaattttaaacctcacttcttagggctacaataaagaattcttcaattctacattcaaacaggaaatcagagcaggtagaggacatcaatgctgaaggaaatgcagagaatcagggtaggtggtggatgctggagggaataaacaagcttcaggacaccaagcaggctttggggaaactagaggttgagagactttggggttttagtgatagaggccgtcatagtcctgcctttgcccagaaacacctgactgaaatccaagtgtcatgttctccctgattttgaaagtctggttctcttgcagcctgaaacctgggattaatattgacaagggagagactagcttttcttctgaattgcttttctcctgggacttaaatattcaaaacctaaaaacaaagaagccaatgattggcagctattgaaaaagtgtttttcacttaaaaatacttaaaaaataagaaaaaacactaattcccaatctcataaaagtccagccagtctagaaaatggggaaaacttccattttcaatgacttagtggtagtgagagaaaggccactgttatgactttctccacatccgagatatcacacatctccataacacatcagagataatcacgtgaaattactgcaatcatgttgttttccaagcaagtgggtacaggtagatctttggatttcaaatgtgctggagtttaatgaccatatcttttgccacagaatccagtagaggcccctctccctttttccctctctcctctgaatgccacacacacaggcacatgttctacacaattccattctatcctgtctggtgtttatacccctgtgatgcagcatctgaaggagagagaaagcagccaggggagccatggctctaggtgtcactgaatcacagaggggatacacaggagagtggaagtgccagggactatgggagagagtggccacgtcctcctagagttttctcatcaaaggcttgaatgaagatggagagtgtcttctcagcaacagagatgggagagatggccagtatgttgaatgacaggttcagggatcaaagagatcttgactggacagagctgaagcctggaattcaacaaggcaaaagctaagggggaaaaggtaaggcctaaactaacaagggcaccaacatggagtgggggaggaaggacttagcctgtgtggatgtgatttggggttatagctgattgtgagtacattctgagtcaacagtgggatgtgggatgtgggatgcagggaagtaaagtgatctttggctacttcattagatgtctggctggagtggaagagctgagagcccccttctattgtggcctggacatgctggagcatcctactcaggtcaggaacctccagtgagaactgcacagaaaattggagtgtgttggaggagggtccaggcccttggaggaactggagaccctaccaatgagaggggaaggcattgagcttatttgacccagataattgagggctattgagtttattgtaaagtatctgcaggactgacctatgaaagagggatttgatttgttctgggtggtctaatgcaggggtcatcaagctatggtctgctgcctgcttttgtaaatagggttttattggagcacagccatgctattttatatattgcttgtggctactttcatgctgcaatactagagttgccaaagagaatatatggtccataaaacctaaaatatttactctctgattctttccaaagaaaagtgtgctgactccaggtctaatgtatgggaataaggtctgatttggaggagttgatggtgaatactttaagaaggtatattttactcaataaaaggaagaaaagttaaatttcaggtattaattgaaggtaagagttgagctaccttcttggtgggattgagttagaggcaattctagcattagtgggtgtttgtcttagtggcatttgactgttctctaattttgggcatttctgatttattgccttgtggagttacttaagttacttttggtttattttctgattaagaaatatgatcacctctattcttccctaccctcctctccttacacacacagctaacatcgtactctgatttgtaactcctgccatggctaaggtaagtctgccctgcactctcttcaagtgtgtttacaagagaattcgaagagggtcccctcttagtgtttcacgtacaaagatgcccataggcaggcatttcaggggcagtattgtaacaacaatctagtgaggtggtatggattagaaatagtataggtcttagagccagtctttttatatatatacattttttattataatttaagttctagggtacatgtgcacaacgtgcagttttgttacatatgtatacatgtgccatgttggtgtgctgcacccattaactcatcatttacattaggtatatctcctaatgctatccctccccactccccccaccctatgacaggccccggtgtgtgatgttccccttcctgtgtccaagtgttctcattgttcagttcccacctatgagtgagaacatacggtgtttggtttgctgttcttgtgatagtttgctgagaatgacagtttccagcttcatccatgtccctacaaaggacatgaactcatccttttttatggctgcatagtattccattgtgtacatgtgccacattttcttaatccagtctatcattgatggacatttgggttggttccaagtctttgctattgtgagtaatgccgcaataaacatacgtgtgcatgtgtctttatagcagcatgatttataatcctttaggtatatacccagtaatgggatggctgggtcaaatggtatttctagttctagatccctgaggaatcgctacactgtcttccacaatggttgaactagtttacagtcccactaacagtgtaaaagtgttcctatttctccacatcctctccagcacctgttgtttcctgactttttaatgattgccattctaactggtgtgagttgatatctcattgtggttttgatttgcatttctctgatggccagtgatgatgagcatttttccatgtgtctgttagctgcataaatatcttctttagagaagtgtctgttcatatccttcacccactttttgattttttttttgttttcttgtaaatttatttgagttctttgtagattctggatattagtcctttgtcagatgagtagattgcaaaaattttctcccattctgtaggttgcctgttcactctgatggtagtttcttttgctgtgcagaagctctttagtttaatcagatcccatttgtcaattttggcttttgttgccattgcttttagtgttttagacatgaagtccttgcccatgcctatgtcctgaatggtattgcctaggttttcttctagtgtttttatagttttaggtctaacatttaagtctttaattcatcctgaattaatttttgtataaggtgtaaggaagggattcagtttcagctttctacatatggctagccaatatcccagcaccatttattaaatagggaatcctttccccattgcttgtttttgtcaggtttgtgaaagatcagatagttgtagatgtgtggtattatttctgagggctctgttctgttccattggcctatatctctgttttggtaccagtaccatgctgttttgattactgtagccttgtagtatagtttgaagtcaggtagcgtgatgcctctagctttgttcttttggcttaggattgactgggcaatgcaggctcttttttggttccatatgaactttaaagtagttttttccaattctgtgaagaaagtcattggtagcttgatggggatggcattgaatctataaattaccttgggcagtatggccattttcatgatattgattcttcctatccatgagcatggaatgttcttccatttgtttgtgtcctcttttattttgttgcgcagtggtttgtagttctccttgaaaaggtccttcacgtcccttgtaagttggattcctaggtattttattctctttgaagcaattgtgaatgggaattcactcatgatttggctctttgtttgtctgttattggtgtatgagaatgcttgtgatttttgcacattgattttgtatcctgagactttgctgaagttgcttattggctcaaggagattttgggctgagacgatggggttttctagatatacaaacatgtcatctacaaacagggacaatttgacttcctctttttctaattgaataccctttatttctttctcctgcctgattgccctggccagaacttccaacactatgttgagtagagagggcatccttgtcttgtgccagttttcaaagggaatgcttccagtttttgcccattcagtatgatactggctgtgggtttgtcataaatagctcttattattttgagatatgtcccatcaataccaaatttattgagagtttttagcatgaagggctgttgaattttatcaaaggccttttctgcatcttttgagataatcatgtggtttttgtctttggttctgtttatatgctggattatgtttattgatttgcatatgttgaaccagcgttgcattccagggatgaagcccacttgatcatggtggataagctttttgatgtgctgctggattcaggttgccggtattttattgaggatttttgcatcaatgttcatcaaggatattggtctaaaattctcttttattgttgtgtctctgccagactttggtatcaggatgatgctggcctcataaaatgagttcgggaggattccctctttttctattgtttggaatagtttcggaaggaatggtaccagctcctccttgtacctctggtagaattcggctgtgaatctgtctggtcctggactttttttggttggtaagctattagttattgcctcaatttcagagcctgttattggtctattcagagattcaacttcttcctggtttagtcttgggagggtgtatgtgtccaggaatttatccatttcttctagattttctgatttatttgtgtagaggtgtttatagtatcctctgatggtagtttgtatttctgtgggattggtggtgatatcccctttatcattttttattgtgtctatttgattcttctctcttttcttctttattattcttgctagcagtctatcaattttgttgatcttttcaaaaaaccagctcctggattcattgattttttgaagggttttttgtgtctctatctccttcagttctgctctgatcttagttatttcttgccttctgctagcttttgaatgtgtttgctcttgtttctctagttcttttaattgtgatgttagggtgtcaattttagatctttcctgctttctcttgtgggcatttagtgctataaatttccctctacacacggctttaaatgtgtgccagagattctggtatgttgtgtctttgttctcattggtttcaaagaacatctttatttctgccttcatttcgttatgtacccagtagtcattcaggagcaggttgttcagtttccatgtagtcgagtggttttgagtgagtttcttaatcctgagttctagtttgattacactgtggtctgagagacagtttgttataatttctgttcttttacatttgctgaggagtgctttacttccaactatgtggtcaattttggaataagtgtgatgtggtgttgagaagaatgtatattctgttgatttggagtggagagttctgtagctgtctattaggtccacttggtgcagagctgagttcaattcctggatatccttgttaactttctgtcttgttgatctgtctaatgttgacagtgaggtgttaaagtctcccattattaatgtgtgggagtctaagtctctttgtaggtctctaaggacttgctttatgaatctgggtgctcctgtattgggtgcatatatatttaggatagttagcatttcttgttgaattgatccctttaccattatgtaatggccttctttgtctcttttgatctttgttggtttaaagtctgttttatcagagactaggatttcaacccctgcctttttttgttttccatttgcttggtagatcttcttccgtccctttattttgaccctatgtgtgtctctgcacgtgagatgggtttcctgaatacagcacactgatgggtcttgactctttatccaatttgccagtctgtgtcttttaattggagcatttagcccatttacatttaaggttaatattgttatgtgtgaatttgatcctgtcattatgatgttagctggttattttgctcattagtcaatgtggtttcttcctagcatcgatggtctttacaatttggcatgtttttgcagtggctgatactggtttttcctttccatgtttagtgcttccttcaggagcccttgtagggcaggcatggtggtgacaaaatctctcagcatttgcttgtctgtaaaggattttatttctccttcactgatgaagcttagtttggctggatatgaaactctgggttgaaaattcttttcttgctctccctctccctctccctctccctctccgtctccccacggtctccctctccctctctttccacagtctccctctgatgccgagccgaaactggacggtactgctgccatctcggctcactgcaacctccctgcctcattctcctgcctcagcttgccgagtgcctgtgattgcaggcgtgcgccgccacgcctgactggttttcgtatttttttggtggagacggggattcactgtgttggccgggctggtctccagctcctaaccgcgagtgatccgccagcctcggccttccgaggtgccgggattgcagacggagtctcgttcactcagtgctcaatggcgcccaggctggagtgcagtggcgtgatctcggctcgctacaacctccacctcccagcagcctgccttggcctcccaaagtgccgagattgcagcctctgcccggctgctaccccgtctgggaagtgaggagcgtctccgcctggctgcccatcgtctgggatgtgaggagcccctctgcctggctgcccagtctggaaagtgaggagcgtctctgcccggccgccatcccatctaggaagtgaggagcgcctcttcccggccgccatcacatctgggatgtgaggagcgtctctgcccagacgcccccgtctgagaagtgaggagaccctctgcctggcagccgccccgtctgagaagtgaagagcccctccgcccagcagccaccccgtctgagaagtgaggagcgtctccgcccggcagccacctcgtccgggagggaggtgggggggtcagccccccgcccggccagccgccctgtccaggagggaggtggggggatcagccccccgcccggccagccgccctgtccggcaggtgaggggcgcctctgcccggccgcccctactgggaactgaggagcccctctgcccggccagccgctccgtccgggagggaggtgggggggtcagccccccgcccggccagccgccccgtctgggagggaggtgggggcgtcagctccccgcccagccagccgccccgtctgggagggaggtgggggggtcagccccccgcctggccagccgccccgtccgggaggtgaggggcgcctctgcccggccgcccctactgggaagtgaggagcccctctgcccggccagccgccccgtccaggtgggaggtggggggtcagccccccacccggccagccgccccgtccgggagggagggaggtgggggggtcagccccccgcccagccagccgccctgtccgggaggtgaggggcgcctctgcccggccgcccctactgggaagtgaggagcccctctgcccagccagccgccccgtctgggagggaggtggcggggtcagccccccgcccggccagccaccccgtccgggaagtgaggggcgcctctgcccggccgcccctaccgggaagtgaggagcccctctgcccggccagccgccccatccaggagggaggtggggggggtcagccccccgtccggccagccgccccgtctgggaggtgaggggcgcctctgcccggccgcgcctactgggaagtgaggagcccctctgcctggccacaaccccgtctgggaggtgtacccaacagctcattgagaacaggccatgatgacaagggtggttttgtggaatagaaaggggggaaaggtggggaaaagattgagaaatcggatggttgccatgtctgtgtagaaagaggtagacatgggagacttttcattttgttctgtactaagaaaaattcttctgccttgggatcctgttgatcggtgaccttacccccaaccctgtgctctctgaaacatgtgctgtatccactcagggttgaatggattaagggcgctgcaagatgtgctttgttaaacagatgcttgaaggcagcatgctccttaagagtcatcaccactccctaatctcaagtacccagggacacaaacactgcggaaggccgcagggtcctctgcctaggaaaaccagagacctttgttcacttgtttatctgctgaccttccctccactattgtcctgtgaccctgccaaatccccctctgcgagaaacacccaagaatgatcaataaaaaaaaaaaaataataataataattaaaaaaaaaagaaaattcttttctttaaggacgttgaatattgtcccccactctcttctggcttgtagagtttctgccaagagatcagctgttagtctgatgggcttccctttgtgggtaacccgacctttttctctggctgcccttaacgttttttccttcatttcaactttggtgaatctgacaattatgtgtcttggagttgctgttcttgaggagtatctttgtgatgttctctgcatttcctaaatgtgaatgttggcctgccttgctaggttggggaagttctcctggataatatcctgcagagtgttttccaacttggttccactctccccatcactttcaggtacaccaatcagatgtagatttggtcttttcacatagtcccatatttcttggaggctttgttcatttttttaaattcttttttctctaaacttctcttctcacttcatttcttcatctgatattcaatcactgataccctttcttcctgctgatcaaatcggctactgaggcttgtgcattcgtcacgtagttcttgtgccatggtcttcagttccatcaggtcctttagggacttctctgcattggttattctaatcagccattcgtctaatcttttttcaaggtttttaacttcttttcaatgggttcgaacttcctcctttagctcggagaaatttgattgtctgaagtcttcttctctgaagacgtcttctcaaagtcattctccatccagctttgttccattgctggtgaggagctgcgttcctttggagggggagaggcactctgatttttagaattttcagtttttctgttctgttttttccccatcattgtggttttatctatctttggtctttgatgatggtgacgtacagatggggttttggtgtggatgtcctttctgtttgttagttttcctcctaacagttaggaccctcagctgcaggtctgttggagtttgctggaggtctagtccagaccctgtttgcctgggtatcagcagcggaggctgcagaacagcgaatattgctgaacagcaaatgttgctgtctgattgttcctccggaggtttcctctcagaggggtacccggccgtgtgaggtgtccatctatccctactggggtgtgcctccaatttaggctacttgggggtcagggacccacttgaggaggcagtctgtctgttctgagatctcagactccatgctgggagaaccactactctcttcaaagctgtcagacagggacatttatgtctgcagaggtttctgctgccttttgtttggctctgccctgcccccagaggtggagtctacagaggcaggcaggcctctgtgagcagtggtgggttccgcccagtttgagcttcctggtgctttgtttacctactcaagcctcagcaatggtgggtgcccctcccccagccttgctgtcactttgcagttggatctcagactgctgtgctagcaatgagcaaggcttcgtgggtgtgggaccctctgagccaggtgcaggatataatctcctggtgtgccgtttgctaagaccattggaaaagtgcagtattagggtgggagtgacccaattttccaggtgccatctgtcacagctttgcttggctatgaaagggaattccctgaccacttgtgcttcctgggtgaggcggctcctcactgtgcttcggctcacactcggtgcgctgcatccactgtcctgcaccgactatccgacaagccccagtgagatgaacccagtacctcagttggaaatgcagaaatcacccatcttctgtgttgctcatgctgggagctgtagactggagctgttcctatttggccatcttggaaccgcccccagagccagtgttaggtttgaatttgaactctacatttactgtgatcttgaaaaagcttcattcattcattcattcattcattcattcaatgtgtattggatacctactatgtgtcaggcactatttaaggcacttatgatatgttagcgaacaaaggagtaaaaattcctttcacctgggagcttatagtcttccagtggagacagataataaatatagtaaatatggaaattatctaatatgttggaagatgattagtactatggaaaaatagaaagtagagcaggataagaatatttggaaactgaggtttacagtttagaaaaaaatcaggtttccttcacctgcttctagtctttgattaaatttcactttctcaatgaggaggtctatcctgaccttaaacagtgaatcaataaaaaacctgctccaccattggcctcccccaacccatagaaggaatctcctccttctaacttctcataccaaaaccttgtagttatccttaaatcctgtctttctctcacattccccatctaatctgtcactaatcttttcagctccccaccatttctcctgcattcactctggcctgttgaatgcccctcaaaagatatatccacatccaaacccctctaacctgtgaatatgaccttatttgcaaaagacatttataactgtctatcctaacctccacattgagaaagtgaaatttaaccagactagaaggaggtgaaggaattggccacccagacctcgggagaagatcagggcactgagatggggtcattgctggtgtgttcaagggacagcaaggaagccagtgtggctggagtggaggagcaggagggaaagcaggaggggaggaaatcagagaggaaatggggggagagtggaagcagattcctcagggcttcgcacatactttgacttttactctgaatgaaatgggaagccactgtaggagcttccattatgagcaagggagtgatctgacttttgattcaacagaatcttctgcctgctagttgagattagacgatagggatgtgtattcgttttctgcagctgccaaaacaaatgaccacaaacgggatggttcaagacatcagaaatttattctcacagttttggaggctggagatctggtcaaggtgttggaagaggtgtactccctctggggctgtattaatcaggattctccagagaaacagaactaatagggtgtgtgtgtgtgtgtatgtgtttatatgtatatgtacatagatggtccctgacttacagtggtttgacttaataattttttgacttcacaatggtgtgaaagtgacacacattcagtagaaacctactttgaattttgatcttttcaataaatcacgtgagataatcaatactttgttataaaatagtctttgtgttagctgattttgccaaactgtaggctgatgtaaatgttctgaggacgtttaaagtaggctaggctaatctatgatgttcagtaggttagttgtcttacatgcatttttgacttacaatattttccatgtacaatgggtttatcggattataaccctgctcaaatcgagccatcctctgtgtatgtatgtgtacacacacacatagacacacacacacatgcacacacacgtatgcagagatttgttataaggaaatggttcacatgattttggaggctgagaggtcccaaggtctgcaattggcaagctggagacccagaagagccaatgtgtatctccagcacaagtccaaaagcaggaaaagaccagtgtcttggctcaatcagtcaagcaggaggagttatcttactgggggagggtcagcctttttgttctattgaggccttcaattgattggtggagaccctctcacattacggagagaaatctgctttactcttctactgatttaagtgttattctcatccagaacactctcaccagacacacagagtaatgttgacaaaatacctgggcacccttggcccagtcaagttgccacataaaagtaaccatcacaggctctaggagagaacctgttctttgcctcttccagcaagtagtggctccagatattccttggtttatggctgcataattccaatctctgctgccatcttcacgaacccttctctctctcaaatctccctctactttactcctagggggacacttgtcattggatttagcccactcagataatgcaggatgatctcatcttgagattctcaattatatctgcaaaaaggtcttttgcaaatacggtcatattcgcaggttacaggggttaggatgtggatgtatctttttgggggcatacaacctatgactggggacaaggtcagtggtagggagattggttaggaggctactgcagaaatccaagcagatgataatggcttaggccagagtgaatgcaggagaaatgatggggagctgaaaagattaatgacagattggatggggagtgtgagagaaagacaggattcaaggataaccccaaggtttcagtatgagaagttagaaggatgggattccttctatgggttgggggaggccagtggtggagcaggtttttgattgattcactgtttacattaatttttggtggagcagatccagagttcagttttggatatattaagtttgaagtgtgttaggcattcaagtggagctattaagcaggcagtgggatttataagtctgaaaactgagaggagacatgtagactggagatgtgaatttgggaattgtcagtgtagagaaggtatcttaaagcctcatgacaaagtttcttaacctcaaggaataagaatccaattatatggaaagttgtgtggaatccaatttgtctgggaagggtgagtcccaggctcatctggggtgagacactttagtccttgctactcctgggacttgctactcctgcattgacatcacctgggagcttggggcagcttgtcagaaatgcagaagctcagaccccaccccaacccacagcatgagaacatgcacagtacaagatcccaggtgttttcaaggcacgtggaagtttgagaagtgccattttcatcagtacagttactcacctcactttcagtgtttgcaggatgggcttaatttaaattttctaggaacactcatttacaatgtctgctagagtgaaacaaaggattagggaaaattctacaggaaagggcaggcacctcattatctaaaaggtgtctccagaggtccagcaaggtgcatcagcctcaggagaaggcagatgtgaaggtgcaggtgaatggggatcctcgcttgttgactgcttgactcctcagtaccagtcttcacagcacaagagtccttgtggtatttattctctttctccaaccccctttcaccacctcctgatacaataattacaaattttacagtccttaaaggatctggggggcacctcaggtgcatagatttttttaacagataaaatatgatttctctaaaagtcttaaaacatgtattttagaaggtgagtctatctttttccctctgttcagtaaggtttgtacaaaaataatctataaatccttgtgtgtgtaggtgaatagactaattttaggagatgctgtctcctgggagaatggctcacagcctgaggacagaggtactgatgtaattcatcttaacccatgatttgagaaatccactttcaaatatttgctttatgaggattttgaaaataggtatgtcttgttttatatagtaggcccatttcagaagacttctcatgaaagccaacttctagaaaccaagccacatttctccattaactaatgtgatcctttcagagacactttgccctcatttctgagtgaggcacaagcagaacttatctcagcttgggaataaggtgaccaactgtcactgtctgcctgtgactgagaggtttcctgggataagggccctttaaaaaaataaacaatacttttagagtagttttaggttcccagcataaatgaacagaaagtacagagacttcccatattacctccttccccaacacatgcacagcctcctccactatcaacaaccaccacagagggaacatgtgctacaatcaattgagcctactttgacacgttattatcaccccaaatccacagtttacatcagggttggtgttgtatattctatggttttggacaaatgtataatgacatgcatccaccattatagtatcatacagaatagtttcagtgctccaagaatcctctgtgtgccacccacttagccctcctttctcccaaatccctgacaaacagtgatctttttactgtctccatggatttgccttttccagaatgttatatagttagaattgtatagtatatagcctttttagattggcttcttttacttagtaataggcatttcctccatgtcttttcctggcttgatagctcatttctttttagtgctgaataatattccattgtctggatgtatcactgcactgcttacttatacattcatctactgaaggatatcttgtttgcttccaagttttggcaattatgaataaagctgccataaacatccatgtacagatttttgtgtagacaaaaattttcaacttatttgagtaaatacatatgagcatgattgctggatcctgcgttaacaggatataagaaattgccgaactgtcttccaaagtggctgtaacattttgcattcccattggcaatgaattaaaattcttgttgcttcatatcctcaccagtatttggtattgttagtgcttggaattttggctattctaacaggtgtgtagaggtatttcattgttgttttaatttgcaatttcctagtgacatttgatgcatctttttatatatttatttgccatctgtgtatcatctttggtgaagtatctgttcaggtctttttattttttaatcaggttatttttttcatactgctgagttttacaagttctttgtaaattttggattaaaagttctttattagatatgtcttttgcaaatacttttctcatctgtggtttgtcttctcattctcttgatcatgtctttcatagaagagaatttttttattgtaaggaagtgtagctcatcaattatttctttcatagatcgtgccttcggtattgtgtccagaaagtcattaccatacccaagagtatctagattttctcctgttatcttcaaatagttttatagttttgcagtttatacttaggtgtatgatctgttctgagttaatttttttttattattatacttgaagttctagggtacatgtgcccaacatgcaggtttgttatgtatgtatacatgtgccatgttggtgtgctgcacccataaactcatcatttacattaggtatatctcctaatgctatccctccccactcccaccaccctacgacaggcctcagtgtgcgatgttccccttcctgtgtccaagtgttctcattgttcaattctcagctatgagtgagaacatgtggtgtttggtttgttgtccttgcgatagtttgctgagaatgatggtttccagcttcatccatgtccctacaaaggacatgggctcatccttttttatggctgcatagtattccatggtgtatatgtgccacattttcttaatccagtctatcattgatggacatttgggttggttccaagtatttgctattgtgaatagtgccgcaataaacatatgtgtgcatgtgtctttatagcagcatgctttataatcctttgggtatatacccagtaatgggatggctgggtcaaatggtatttctagttctagatccctgaggaatcatcacactgtcttccacagtggttgaactagtttacattccccccaacagtgtaaaagtgttcctatttctccacatcctttccagcacctgttgtttcctgactttttaatgattgccattctaactggtgtgagatggtatctcattgtagttttgatttgcatttctctggtggcctgtgatgatgagcattttttcatgtgtcttttggctgcataaatgtcttcttttgagaagtgtctgttcatatccttcgcccacttcttgatggggttgtttgattttttcttgtaaatttgtttgagttcactgtagattctggatattagccctttgtcagatgagtacactgcaaaaatgttctcccattctgtaggttgcctgttcactctgatggtagtttcttttgctgtgcagaagctctttagtttaattagatcccatttgtcaattttgtcttttgttgccattgcttttggtgttgtagacatgaagtccttgcccatgcctatgtcctgaatggtattgcctaggttttcttctagggtttttatggttttaggtctgacatttaagtctttaatccatcttgaattaatttttgtataaggtgtaaagaaggggtccagtttcagctttctacatatggctagccagttttcccagcaccatttattaaatagggaatcctttccccatttcttgtttttctcaggtttgtcaaagatcagatagttgtagatgtgtggtattatttctgagggctctgttctgttccattggtctatatttctgttttggtaccagtaccatgctgttttggttactgtagccttgtagtatagtttgaagtcaggtagcgtgatgcctccagctttgttcttttggcttaggattaactgggcaatgcaggctcttttttggttccatatgaactttaaagtagttttttccaattctgtgaagaaagtcattggtagcttgatggggatggcattgaatctataaattaccttgggcagtatggctacgttcatgatattgattcttcctatccatgagcatggaatgttcttccatttgtttgtgtcctcttttatttcattgagcagtggtttgtagttctccttgaataggtccttcacgtcccttgtaagttgtattcctaggtattttattctctttgaagcaatcgtgaatgggaattcactcatgatttggttctctgtttgtctgttattggtgtataagaatgcttgtgatttttgtacattgattttgtatcctgagactttgctgaagttgcttatcagcttgaggagatcttgggctgagacaatggggttttctaaatatacaatcatgtcatctgcaaacagggacaatttgacttccccttttcctaattgaataccctttatttctttctcctgcctggttgccctgacccggacttccaacactatgttgaataggagtggtgagagagggcatccctgtcttgtgccagttttcaaagggaatgcttccagtttttgcccattcagtatgatattggctgtgggtttctcataaatagctcttattattttgagatacgtcccatcaatactgaacttattgagagtttttagcatgaagggctgttgaatttcgtcaaaggctttttctgcatctatggagataaccatgtggtttttgtctttggttctgtttatatgctggattacatttattgatttgcatatattgaaccagccttgcatcccaggtatgaagcccacttgatcatggtggataagctttttgatgtgctgctggattcggtttgccagtattttattaaggatttttgcatcaatgttcatcagagatattgtctaaaattctcttttattgttgtgtttctgccaggctttcgtatcaggatgatgctggcctcataaaatgagttcgggaggattccctttttctattgtttggaatagtttcagaaggaatggtaccagctcctccttgtacctctggtagaattcggctgtgaatccgtctggtcctggactttttttggttggtaggctattaattattgcctcaatttcagagcctgttattggtctattcagagattcaacttcttcctggtttagtcttgggagggtttatgtgtccaggaatttatccatttcttctagattttctagtttatttgcgtagaggtgtttatagtatgctctgatggtagtttgtatttctgtgggatcggtggtgatatcccctttatcatttttttattgcatcgatatgattcttctctcttttcctctttattggtcttgctagtggtctatcaattttgttgatcttttcaaaaagcagctcctggattcattgattttttgaagggttttttgtgtttctatctccttcatttctgctctgatcttagttatttcttgccttctgctagcttttgaatgtgtttgctcttgcttctctagttcttttaattgtgatgttagggtgtcaattttagatctttcctgctttctcttgtgggcatttagtgctataagtttccctctacacaccactttaaatgtgtaccagagattctggtattttgtgtctttgttctcattggtttcaaagaacatctttatttctgccttcatttccttatgtacccagtagtcattcaggagcaggtttttcagtttccatgaagtcgagtggttttgagtgagtttcttaatcctgagttctagtttgattgcactgtggtctgagagacagttcgttataatttctgttcttttacatttgctgaggagtgctttacttccaactatgtggtcaattttggaataagtgtgatgtggtgttgagaagaatgtatattctgttgatttggagtggagagttctgtagctgtctattaggtccacttggtgcagagctgagttcaattcctggatatccttgttaactttctgtctcattgatctgtctaatgttgacagtcgggtgttaaagtctcccattattattgtgtgggagtctaagtctctttgtaggtctctaaagacttgctttatgaatctgggtgctcctgtattgggtgcatatatatttaggatagttagctcttcttgttgaattgatctctttaccattatgtaatggccttctttgtctcttttgatctttgttggtttaaagtctgttttatcagagactaggcattatgacagctatgacttcactaggtgataggaagttttcagctccattataatcttatgggaccactgttgtatatgtagctcactgttgaccaaaatgccattatacagcacatgactgtagtgatcccaggatagatagatagatagatagatacacacacacacatagtaaagtgattcctacattcaagcaatttaacatatccaccatatatccaaacagctttgtgtatgccaatcagacctcaataaagtggttacatatacaagtggttactccagcccaggctagagtgcagtggtggtgtgatctgggctcactgcagcctttgcctcccaggttcaagctatcctcatgcctcagcctcccttgtagctgggattacaggaattcatcattgtgcccggctaatttttgtatttttagtagagacagggcttcactatgttggccaggctggtcttgaactcctggcctcaagtgatccaccccccactgggcctcccaaagtgccgggattacaggcatgagccactgtgcctagccatgatgtcttttaattggtgtgtttggaccattgacatttaaagtaattgttgatatagttggattaatatatatcattttttgttactgttttctatttattccttttgttctttgttcctatttgtcttccattatttttctaccttttttggttttaattgagcactttatgtgattctactgtcttttttttttttagcatatccatcaaatgctaaaaagcgtatacttttacattttgaagtggttggcatatagtttgcaatatacatttacgatgaatccaagttcattttcaaaaaatactatattgcttcccgggtaatgctagtagcttataataaaaaaatactcatattctccctcccatctctttcatcattgctgttattcatttcacttatgcataagccgtaatcattgttaacattgttgctattattattttgaacaaactgttgttagatcaattaagaatgagaaaataagagattttaatttactttcaattcttccttctctaatgttctttctttttaaatgtaaatctgagtttctggtctttataattttcttatttgaagaggttttagcatttcttacaaggcaggtgtaatggtaacaaattttcttaatttttgcttttctaagaaagtctttatttctcctttacttttgaaggataatttcacagaatatggaattccaggttggggagttttctttttcttaacattttaaatatttcatcccattatctccttgtttgaatgttttctgaagagtcagatgtaattaatatctttgctcctctataggtaaggatttttttttctcctttggtttcttaagagtttttcatctttggttttctgcagtttaaatttaaggctcatgcctttaataccagcactttgggaggctgaagtggcaaaattgcttgagcccaggagtttgagactagcctgggcaacatggtgaaactctggctaatttttgtattttgttatcgagacaaaaattagccaggtgtggtggcatgtgcctgtctctcatctactcaagaggctgaggtgggaggattgcttgagcccaggaggtcaaggctacagtgagtggtgatcacacttatgtactccagcccagcctggatgacagaccctcaaaaaaaaataaatgaaataaaataaaaaataaaaagaaaataaaagaaaaatattaaatgcccagtgtggtttttctttttttttttttttttggcatttgtcctgcttggtgttgtctgtggtttggtgtctgacagtaattttggggaaattctcagtcattattgcttcaaatattgcttgttttcctttctttcttcttctggtattctcatcacatgcgtgttactacatcatttgtagttgtcccacagtttttggatattctgtattgctttttttcagtcttttttctctctgattttcagttttaaaatttctactgacatatgctcaagctcaaagtttctttcctcagccatgtccagtctacaaaagaacccatggaaggtattcttcaagtctgttacagtggtttttattttattttttattatttttagaggtaggttcttgttctgtagcctaggctagagtgcagtgacgcagtcatagctcactgcagcctcaaactcctgggctgcagcagtcctgtggcctagcctcccaagtagctgggactactggcacacgccaccatgcctggctaatttttaaaacatttttatagagatagggtatcactgtgttgcccaggctggtcttgaactcctggcttcaagcaatcctcccactttggcatcccaaagtgctgggattgcaggtgtgagcccctgtgcctagcctgttagttacaatgctttttatttctagcatttctgtttaattctttcttagaatttccatctctctgcttatgttacacatctgtttttgcatgttgtctatttttttccgttagaacccttatcatataaatcatagttgtcttaaactcttgtctgatagttccaaccatcctgccacacctgactttagttctgacacttgttcagtctcttcaaaatgtgtttttggccttttagtgtgcctgcaatttttttcttaatagccacacctggatgaagggaactctggtaaatgggcatttagatgtgtggtggtgaggtgttggctgggggaggtgctctatagccctataattggattgtggtcttttagtgagcctgtgcccctggactgtgacctttataatgttccccagtgttccctgtcccccaccttatgtaggacaggatggttagaggcggtccgagttgtgtattctccttcccccacatggaaggccagagtgggatgcagttgggtatttccttcccccagttaagttggactctgatataaccccaacagggtaagctctgttaaaatatttttcttgcgcgcaagccttgttaagaagtacagaattccctggtgtatttcaaaatggctgctttccccctctttctgctgtaagcaggaggggatttttcttctgccttcactgtgagaacctggtaggcttctagagataagactcacagaagtgtgagggccttcctataactgaggccccctgtaatttttaactctcaggcttgtccaccctgagcctctggcaattcatcaattacagttcaggtcatcttactgcagtactggttcccacacaggtttctgctcatgggcttctgctctggtgagttgtgattttctgtctctgcctgtctatatgtccaacttttggggcagtggttttccccatgaaccttccttctctgacggatctgaaaagaattattgatttttcagtttgtttagctttttactaggacaaggtgatgacttccaaactccttacatgtcagatcagaaactggaagtcagataagggccttgccatactaaaacaggtgcagttctggggaaaccaggatggttgatcactgtaattgggagtaaagatatcctggatcccgtctgggctcaggtgaaccccctgggacatggaattcagtgtgttggagccttagcttcctttgggtgaaatgagagagggttgacattaggctttcttctatctacttttaagttggtaggatctgattttcttatgctgggtattcttaaagcaagacatttctggacttaaactagtggagactacttgctaggagacaaaacctaattctcttgttaaacattcttatccttgacttggaataatcatggtttggaaggcacagtgaccctttgctcttaaagggcctgcctgctgttttcacccattacgacatttgtcacacagcagggagtttttgccctttaacatcacctgtttcaaaacagaacaattttggtaggtatggacttaggatattctgctgtttttggttgaacttgactgaagggatcttgactgaaagtagaagaagtaggagtggggcaggggtatggtgtgaaggcctggcccagcctattaaccgaggacactgcaggttgacctctgatttatttctttccaaatggcttccagcctctgcatctccaattattccatgatccctgatttgcccagcaacataatcagaaacattgagtgcatctttatctttgaaagtccacagcagagaaatagctaagggaatttttatgaaattgtaatgtgcccacttgaacacaaaccctaatttcctaaagtctagctgcagtttgaagaattgcctaatttttaaaagttgaattttgctgtcagagaggctgcctatacttactgccagcattgttatttatctttatatattttagtcttagctcttgagtataaaaagctctctccttccttcccttccaagagttgagtttcaactgcgtgactagattgtacaattttgcccaggcttaaggcttcgcagggaaatggaacatgctgctgtctcattgtttcttctggcaaaggacagattttcccagtggcaaatagacatggggagaggtcaaacgtttctaaaaggcagaatgggccttaagaagtcttctgctccagctctttgcttcctggcagaatcatattcaaaccattccaggtagaaaagggggtgtcacaatgtctcttgggaataatttcgttcccaaaagagtcttgtggaaggtctttaatttcaagccaagtcatccacaattgcagaggacaacactacataacaggtatggtttaagtactgggatacagcagtaagcaagataggtgaataaataagaaaatcagtaatactatcaagagaataaaacagggacatgtggtagaaaggcctagggatgcagtgagggttacagaccttgaaaggaaatgggccaggagaggttgggtgaagtatgtggtcatatttaagatgagatctggatgacagtcttttagattctatcccatagacaaccgggaaccagcaaagatttctcaaatgggtgaacacagtataatgtaatcaataatccatgatcatacctagataagcatatatgtcttattttttagaagaagctcagcctggccaacatggcaaaaccctatctctactaaaaaaaaaaaaaaaaaaaaaaaaattaggcaagcacctgcctgtaaccccagctacttgggaggctgaggcacgagaattgcttgaacgtgggaggcggaggttacagggagctgagaccatgccaacctgggtgacaaagcaagactccatctcaaaaaaaggaagaacctctgtgaagtaactattattccaattttacatgcaaacactaagattcagaggcctcagtgaccttgtgccggaggggaccgacagtctcttattccttttgatgagaaatgtggagacccctttccttttctcatttccttccgtttcccaagtccacacaggtagtctaaggaactggctctttcccacatgttgtctgtttgatcttgggtcagtcagctttggaatgaatttgcctatctatacatggatgaggtgcccttgagaggcctcacagacttcaaatattttgagcatggaattcatccttatatacactctttttaggcccaagggaagcaagatgtgtgtgttggggggacttctggctctttttatgagttgagggatggtaaaacaggaagccatttcctcccctcctgtggcctggagggagaaccacagaacacactggggtccttgccagcctgctttgggggtgttcagctgcttttgagactccacattccacctggtccttgtaataaatgggtgcacacatgtttatcttcccgcttaccaccatcctcatgatagtggacttaacagtgacctattaggctgtttattacgaggtgaggagtaaaaacagtctttgttagtttctcaaaaagtaggtcaaacataccgaatctgttatcgtgttatttaatcttcagatattaactcccatctattctgcaacctcccctggggagtttgcaatgagaagggatgttttatagcctggaatgtgtgtttgatgatctctgcctcattaaattggaatagaacccgtcatttgttcttctaatagacacttaaacaacacaccatatattagcactctttgttacagtttctctttgagatacctaagcagtcagaaggaagccaaggtctttaccctgctcaaccttcccccacccaaatgccccggccatttctgggactgttaacaatagatgttaggacggcttacccctcttccacaggacaatggctctatttttttttgtggtgaggggaggttggtgatgacttaagcaattgtttgtggtaaaatacatataataaaatatgtaccatcttaaccacttttaaggtatagttcagtgggattaagtatatttatattgttgtgcagccatcaccaccattcacctaccatactttcttatcttgcaaacccaaaattggatgcccatgaaacattaactcatcctttcttcctctcccctagctccctggcaactaccatcttactttctgtctctatgaatctggctactttaggtacctattgggagtggaatttgtccttatttcactggcttatttcactcagcataatgtcctcagcgttcatccatgtcatagcctgtgtcagaatttcctttttgtttgggctgggcgcagtggctcatgcctgtaattccagcactttgggaggccaaggtgggcagctcacttgaggtcaggcgtttgagaccagcctggccaacatggtgaaaccctgtctctatgaaaaatacaaaaaattagctgggcgtggtggcacaggcctgtaatcccagctacttggggggctgaggcacgagaattgcttgaacctgggaggcggaggttagagtgagccgagatcatgccactgcattccagcctgggccacagagtgagactctgtctcaaaaaaaaaaaaaaaaattctcttccttttttagggctgagcagtgttctgttcaatgtatagactagttttgtttctcagctcctcagtcagtggatacttggtttgcattcgtcttttggttattgtgaataaatgaggctgctctgaatgtgagtacaagtatctgagttcctgtttttctttttttctctttctttctttctttcttccttcctttctttctttcttttcttttcttttctttctttctttctttctttctttctttctttctttctttctttcttctttctttctctttctttcttttcttttttctttccctttctttctctttctttctttctctctctctctccccttccctccttccttccttccttccttccttccttccttccttccttccttccttccttccttccttcctttctttctcttttgacagagtctctcactctgtcgctcaggctggaatgcagtggcatgattatagttcactgcaacctctgcttcctgagtttgagggactgttgtgcctcagcctcccgagtagctgggactacaggtgcctgccaccatgcctgactcagttttgtggttttagtagagatggggcttcgccacgctggccaggctggtcttgaactcctggcttcaagtcatctgcctgcctcggcctcccaaagtgctgggattacagacatgagccactgtccctggccctgagttcctgatttcaattcttttggttaaatatccggaagtggaattgctggatcatatggtagttctatttttgattttttgaggaaatgctatactgttttccatagcagctccaccattttactgaatctatgtataattatttttatcatttaaattctaatgatatataattcattatacattcaaatattttacagaaaattttcctttaccttaaaatattctttatgtgtttcctttggatccttgtcaatagatctccctttggagtcatccttgacttgtcttttttcctctatatccaacatccaaagaatgaggaaattctgtcaatttggtcttcaaaatatatccagaatcccatcaattcttaccatttccacttgcctgacttgccagtctgctctccccatagcagctggaacagtatttctaaaacctgtcagatcatgtcattcctcggcctgaaattctcctaaggtcttacccatttcataaaaccaaaggccttaccatggctgcgtggcccttccatcccagcccctcctgaactcgcctcctaccatccctgcctttcctgaactcacctccatcattcctgcccctcctcctgaacttgcctccatcatctctgcccctcctgaaattgcctcccatcatccctgcttctcctgagcttgcctccataatcccttcctcccctgaactctcctcttgtcatccctgccccttctcctgaactcgcctccatcatccctgcctctcctgaactagcctcccatcatccctgcttctcctgaacttgcctcttgtcatccctgcttgtcatgaactcgcctccatcatccctgcctctcctgaactcgcctccatcatccctgctcttcctgagcttgcctcccatcatccctgcctctcctgaactggcctccatcatccctgcctctcctgaactcacctcccatcatccctgcccctcctcttgaatttgcctccatcatccctgcccctcctcctgaatttgcctccatcatctctgtccctcctgagctggcctcccatcatccctgcctctgcttctgaactcgcctccatcatccctgcccctcctgagcttgcctctcatcatccctgactctcctgaactcgcctccatcatctatgcctctcctgaactcgcctctcatcatccctgcccctcctcctgaacttgcctctgtcatccctgcccctcctcctgaactcacctctgtcctccctgcccctcctgaacttgcctccatcatccctgcccctcctgaactcacctgtcattatccctgcccctcctgaactcgcctgtcattatccctgcccctcctcctgaacttgcctgtcattatccctgcccctcctcctgaactagcctgtcattatccctgcccctcctcctgaactcgcctgtcattatccctgcccctcctgaacttgcctgtcattatccctgccccctctcctgaactcaactgtcattatccctgcccctcctcctgaacttgcctccatcatccctgcccttcctgtaccagcctcccatcatccctgcccctcctgaactcgcctgtcattatccctgcccctcctcctgaacttgcctgtcattatccctgtccctcctcctgaactcgcctgtcattacccctgcccctcctcctgaactcgcctcccatcatctctgcccctcctcctgaactcacctcccatcatccctgcttctcccgcagtcgcactggtgttctggctgctcctggaacacccaggtgtgtcctttctcatctttgcactcaatgtctcctcccctggggcaccttcacttccaccctctcccctaccccagctgcatggcgggatacttccttcccttcctctgttcaaatattaccttctcaaatagacctttccagaccaccctatttaaaagtttaaactagcaccgtccccactagctcccatcctcaaaccctgctcgattttcttcacagtccttagctccaccagtcacatttgcctttatcccgtctccaccacaaggtaaacgccgtaagaaatatacccttccctgttttgttcattctgtatcccagaaccctagcaagggctggtgtatctaggaattcctacctagtccttgaatgcatgttcatacctgcatttcacacagtagtgataaactcttaaaaggctctggagtcaaatttcctagcttctaaaatgggttccggtttaattactttgaatattttgcttaagctaaacctcagtttcctcatgtgaaaaatggggacaaataataactcctatctcataaagttatagctgaggattcaatcagataatctatgtaatgtgctagttgctacatctgcaaatggtaagtgatcagaaaaagttgttttgttgtaattgatgttattcttttgatttctgcggtttttttgcttgatcttgtttcatgtgcacaacagcaaatatcattttttagggctatatgatctgcattctaatgatttatggcacctggcttagccattccccaggtagatgattctgggctttttttttttccattataaatagtgctgtgaccagctcctttgtacaccttgtaaatgtgtactttttgttcatccttgttaaatataaactgttcgggatgttgtcttttatttggcttgccggatgaaaggcttggaggtggtcatgtggcctttctccacttggccgacccagcacccccggcccacttccaatgacaccagctggacacaatgctactgcttgtggcttttctggttgaagtggaggctgacgaagggcaggagtttttctgtggaggaacatgacatagaggaaagggaacaggctctgtggctaggcagacctggggtagaataatggtgctgatgtttcctagctgtaggatctgagtcaagttatgtaacctctttcaacttcagtttccttgcttaacaacgaaaactaagatgacctacctgaaagggttgctgtgaagacggcagattccattcgaagcatgtttagcatagtgcctggcacacgagaggtacatagacagtgtctgctgtccctattgctatttttctttgcagggagatggtctctgccctacaggatgctggttaatgggggagggtgggtaaaatgttaaggtcgaatgataacattgccactcagtctcatggaaatgcaggcctgtctagtgtctttgtgcattggaagataggtttcggccctgcaacttctccttctagaggatactctgacttggtttaaacaccatcagtgaaaaaagctttctttcccatctagcctgacccttcatttcatggcgttcgtggtgcaagcgcttgaggccggtgccatcaggggccttgcctgagatgactgagctggttggtgtctggcctgaaaacacagatcctggcacctccagtctggctgcctcacctggtagaataagcctgcaagtgtaaccccagaaggacgatgaaagtctttctccctgtatttttctcttctcttttaaaaattgccatttagtttagagccgagagaacattcaaagtctgagttagaggtttcaaatgtgtgacacctggggaagggggctggtgggacacctgactgctctgggaagaggtgtgatttgtaaatcttgttgtggtctgaggtgagagggaagactagacacatgagagacagggagagaagataattaaaacaatgacaaagataggattatttataatggtacaacagagtgagtgaattcagagatggacctgggttctgagattgcaaataagatgtatatatatactccaattgaagctgacttaagcaaagacaaactaaatggaatgtgttgacaaatgtacctggctgcttaccttccccctcagctctgatctttctctctgttggccttgtttggcatctcctccaaggagggcaggatggccatctttgactcctggctgtcatcttagcatcatcagtgaaaacacacctatttcctactaattccaatgaaagccctagaattgagccacactggcctgacttgggtcatgtgcccatcctgaaccaatgactgtggccaggagaatcatatgcttgttgggcaggctggggtcatttgtccagcttgggaggcacctgccttcctgcatcatatgggctgagggagggcaggagggggctcctcacaggaaaatcagagcatgtttagtggaagaaaaagtaaagaatactgggcaggcaaaaacctcaggtctctgctccatttattatgtgctgatatttactcatctgaacatttgcctttgtgcaaatgaaagggtgccccatgaatggcttgtgtcaggtgaataaacccagtcttcataagaataaaaatataatgtatcaccttttgtaattttcctacaacctttgtacacaccacaagtagggggattgtatatgactattgaatttgagttcaataaaagatttgtacctcctgaattacacttccacacacaagataggatacattaacttaattactgttggattcaataacataggccattgccctgggaatttattttgtgttatactcagagagaaaaacggcatcatttctaaaggcagtcaatttccaattatccatgctaatggaagaacacagcatgtggagactctaaatacagtttctgtttggtttagggagtggacatgattttttatttatctacctgagttatttgtcttgcttgggcttaggaaacataaaaaagagtttgcattatctgggtctatactttctttcttctttttcccttggtttacaaaatgtgaagtgtattttattatttggattaaaaaattttcattttgaactaattttagacttatgtaatagttgcacaaatagtgtagtttccttatatccctcactcagcttagcttaatgttaacatcatatataaccatagtacaaagccagaaactaacactggtacgacactataaactacagactttatttgaatttcacccattttctaccaatgctccttttctgttccataatcccacatttagttgttatttcactttagtctcctccaattttcaactgtttctcagtttgtcttattttttatgatcttgacacttttgaagaatactgatcagttattttgcggaatgcctccagtttgggtttgtctgatgttttctcatgcttggaatgagctatgcatttttggcaggaacgccaaggaagtatcctctgtgaatggtatcaagaggttcatgatgtcagcatgtcttattattggtgattttgatgttcatcccttggttaaggtggtttctgcaaggtttcttcacaataaagttactatccttccttttataattaacaaatatcttgggggaaatactttgagaccatgcaaatcttacgtttcttcaaaccgtcacctgctaattttaccatccattgatagatcttgtctgcaacaattactgtagtgtttgcctaatgatgattttctatttccctttttccttctacgtttattaattagaagtctactgtaaggaggaactgtcctttcttccctatttgtatgtttatttattctgtaggttaaatccgatactatcattattttttttccaaaatttttctagctctgaccattaggagctccttcagcttggactctattatttatttattcaatagactttacttatttagagcagttttaggttaacagcaacattgagcagaaggcattgatacttcccacctactccctggtcccccccacatgcacagactcccctattatcgacatcccctaccagagtggtacatttgttacaattgatgaatctacattgacatcaactaaaatccataggcattgtgtttcagtgggtgcagtacattctatgggtttagacaaagtctaatgacatgtatccctcattatagtatcatacaaagtagtttctctgccctaaaatgctctgtgctctgcttattcttacctctccaccccctatttcctggacatcactgatctgtttactgtttctgtagatttgccttttccagggtatcatatagttgaaatgtcgtgcagtctgtagccttgtttcagcctggcttcttttgcttagtaatatgcgtttaagcttcctccatgtctcttcacagcttgatagttcattgcttttcagcactgaataatattccattgtttggacataccacagtttatttatctagaccttattcttttgacaaatccacatcctttgtgagcattttctgactttctatcaccacaaagtgttccagctttatctcatatttttcctgctctagcactgaaatcaagcacttttcaaggaaccctagttcttttaattgaatagtgcttagaatagaacagtgctttgaaatcaagacctaggcactaggtatgctcgtagatactgggttgcatttgttctagaccctctccgtagagctaggaaatatatgtattttactaatctgtacatatataccatctatatttcttgcaccatggtttgatgaaaggagtggccatggttgcagagataaaaactatgtatggtcccaacaatatgggtttccttaccctaaggctaatttagctactgccacagcccaatgttccacctgccagaaaccgaccattgctgagcctttgtgtatcagacctcttccaacttggaatgggcaatgtttcattctgactgggattgatacatattcaggggtcagatttgcctttcctgcccacagtgtctcagccagcaccactatgctagggaccaaatcagtgtctgatctactggcatgggataccacattacattgccttttatggcaaagaagttatggcagagagaacattcatgagatccactgatccttttaaaaactataccatacggaagttgctggcctgattaaggattggaacagcctgttgaaggtatagctgaggtactagtttagagatgatattctgcaaggatggggcaacatcctttaggctgaatagacaccttaaaccaatagacattagatggtgctgtgtccctagtagacagaatacatgagtcagagaatcaaggggtggaagaaagagcacccctgctcatcctcatacccctccacccaggcagccaacagccaatgccatggggaaacaaaagaccagcccctcaaagggcaccaagaaggggtatgactctgtgttcctgagctccctggggacacgatggaagtggtctctagcagagaccacacctttgcttggctttcttcccctgaacttgtctgcttcccttgctctccttcttggagtgtgctctcaatcaatcacttcctcaagaatccttgtttcaggctctgcttctagagagatggtgctgattgggaatttttattcaattaatgtcatacttcccatctcttaaatattctcaaataataagatttctaatggccacacgatgttctattatgtgaatatagtttattgaaccaatctgattctagacatttaggttattcctgagctttcactattataaataattcagagaagaacataattgttgctaagcctttgtaaacattcttaattatcttttcaggttaaattcttatgggtgaagttacaaagtcactggtcacaaacattttgtggctcttaacataaatatcaagaaccttggcctctaagaggactgtaccagtttatgatcccacaaagaaagcaactttttttcatttttgccaacccagagaataatgatttttagaagtatctgcaaattttatcggtgacttattatcttaatgtgttttactttggttacttggcagtttggttatttgtagttctttggtgaattgtgtattcaagacttttgcccattttcccattgatgtattttcctcattaatttctttttcttttcttttctttttttttttgagacagagtctcactctgtcacccaggctggagtgcagtggtgtgatctcggctcactacaattgagttcaagcagctctcctgcctcagcctccctagtagctgagactacaggcatgggctaattttttgtatttttagtagagacaaagtttcaccatgttggccaggctgctcttgaactcctgaacttatgcgatctgcacacctcagcctcccaaagtgttgggattacaggcgtgagcctggcccctcattaatttctttgagccttttttttttttttttttttttgtaattgattgaaagtacagggaactttcaattgtagatgtaaagggcaccatacagcttttcacagagtgcaacgacagggtagaagtaccatggccctgtcccttcatttcacaagagaagaaactgagtcctaggaacatccaggaaaatctggcattgattgggccaggcctcatgactcccaacagagttcttgctccaccatctttgtcagaagtgagggctaagagctgacagaataacagacactactgccaatccaacattaatcatgcacttagtatatgtcatatttggtgcaaagcactctgtgtatatgatctaatcttctcaaaaccctgatagatatgtgctattatgactaccactttacaaaaaaggaaactgaggcacagagagggtgaaaaacgtgtagaggtcatctatgctaggaaccctttggaagaaggaaaagaacattccccacggttgtgccctaacatagtcacagcttgtccctggtgcggttcttttcctcttcccttccccgctgctaaagtcattctgtgcacccaattctgtaacttgcttttctttcactctatgtttcatgttgcttcgtggattttatagccatcattttaatgccctgcataatattcctttgttgagcagatgctaaattcttgaatttagtgtactcccactgaagatgttgggagaatttctggggacccctgctgtctcccctgcagttccccctggcttgataattcccttttcacttcatgccttgagtgaaatgatacaaatttaacttgcaaattgcctaaggatgtctttcatagttggaggcatctgtaaattatatgcaaatatgtgtgcagccaggggaattcttccaatgctttgaccttaagaaaaatctagtggagatgagtgtgtaaatggttaaaatttcttctctgagcctcagtttctcagtctataaaggggtgaactaacctgcttgtgtgagctgcatgtgtgagactttaaggagaaattacatggtatagaattatgaaatcctatcaatttaaggggtacaagtacagttttatttcatgtatatattgtatagtggtgaagtctgggcttttagtgtaaccgtcacctgattagtgtaccttgtacccattaaataatttctcatcccttatgctcctcccactcttctaaatctccagtggctattgttccacactctatgtccatgtgtacacactgtttatctcccaaccgtaagtgagaatatgcagttcttgactttctgcttttgagttgtttcacttaagatcatggcctccatttccatccatgttgcttcaaaagacatgattttattcctttttatggctgaagagtattccattgtgtgtgtgtgtttgcaccacattttctttaatcgtctattggtgaacactcaggttgattccatatctttgcttgaacagacatttctctaaagaaggcctacaaatgtccaacagatgtatgaaaagatgctcaatatcaccagtcatcagggaaatgcaaatgaaaatcacaaggagatatcatcccacacctgtcaaaatggctattataaaaaaacaaaaaagacaagcgttggtgaggatgaggagaaactgaaacccttgtacactgttggtgggaatgcaaaatggtgtagccgctatggaaaacagcatagagatttctcagaaaactaaaaatagaactaccatatgatccagcattccacttctgagtgtttatccaagagaactgaaatcaggatctcaaagagatattagccttcctgtgttcattgaagctttattcacaagatgtggaaataacctaatgttcatggataagtaaatagataaagaaaatgtgacatatatatatatatatatatatatatatatatatatatatatatatatgatggaatattatccagcctttaaaaagaaggaaatcctgcaatatgtgacaatatggatgaacctgggggatactgagctagtcacagaagtacaaacactgcatgattcttatatgagctatctaaaatagtcaaactcatggaagcagagagtggaatggcagttgcaaaggggcaggtggaagggggagttggaagttgctaatcaacaggtataacatttcaattatgcaagatgaataaattctagaaatctgtacaacattgggcccataaatgaccatatttaagcattttacacttaaaaatctgttaagggagtacatttcacgttaaaagtttttagcataaataataataataatgataataatactgatgcgtttctagtattgttcatttctgggtgcttgagcatgttcaatttagtgtgcagaaccttgctgactcatctgtattccattttggaagttttgttaggaaatactcacaggaagtatggttttggttcatgctagctcagtgggtggttttggaactccttttgagttccagtaagatggggcttctcagggggtgctgcaaacgagttgggttcatttcgttgtgtttcccgggcccttctggatgtgtgggactcctccagctccagttttgctctctggtttccatcccagcttgaaagctgtttggagcgcttgttcctcaaggaactccattttgctcccagtcctgggatcctcggtgagctggagcctctttcgggaccctcgtcctgtgggctcactctctgttgactcagcagtcaccatcttctattccccaaggcatgagcccgcattgcacccacactgtgcagtccttctaaaggcagccatctggcactgaccctgagaggaaaggagggccctgccagcctatcccagagctttgtagcctgcgtggagcctgatgccaacatgcggttgcatttctctttgtaaatgaatacaaagctaataagaaaaggaaaaagaacctggattgcctttctgagcaaggaaaagaaaattgtcttcaagtctcagagggcttgttattcagccaacagagatcaggtgtgtacatattttccatcagactatgaagtgcgtaagtcttggacatcaagggaaatgctgtgggttccatgggctgtggcagcgctgtgcctgagtgctgtagtgggtcatagtgggagctttgacgtcaagtagtccctggctcttcttccatttactcaatgagtgatctgggataaaggatctctcaactctgggactcaggcttttgtttttaacatgaggcttctcacagcgcctatttcatgggggattatcaggaggattacatcagataacacacaggactgtggtgtctgacatgctgtaagtgctcatgcatgtcagcccatgttgttggtagttttgtggccctcatgattttttcctctgtagtcaggacttgggcatcctcttctctgtttctgagtagttgctttgccattagagttttctggtgtttactttcatattgttgtgaggtattcatttgcttaaaatcatttcctcctaaagtgggttgtccatacaccatggctctgcatagggggaagaaagcaagaaggcatgtgtgtgtgtgtgtgtgtgtgtgtgtgtgtgtgtgttggtgggggtgggggcgggtgggggaaacggctgtgagggacgcagggagatggagtgagcctggctctactgaatacatataatcaatgggtgaaatcgacgtgttcgcaaaagttacaggccctgctgggtgagctgctttcagtggtgtcaagaaatgcatctgtttcattactcctcttcttgggataaggaattattccaacatcaccttcaaaccacagcagaagagcctgggagtgggaaggtcatgtcattccctcacagtccctactttctatccaaggggtgtttgggggttaaaatattcaacataaaccttggagcttctttgcttcaaagaagggaaggaaacaaatgcaattgagctatgagtatttattaattcactcaatatttattgtgcacttatgtcccttttttcagcactatgggttcagcagcaaatgagacagacacaaacccggaccctgcctttgtgccgctgaatgtcaggtgggagaatgacatcaagcaattgtgcagttgtgatgagtgcaaagttgtgagggtcaggggtgacttttctgaggacttgcagaagctgtggccagaagggtgagtggggctgtctccaggagaagaggggacagggaggagagcgtctcagcaggagcgagccctgcaggaaagggcctgagtggagggggcaggatgctggtgaccagagcaggaggggcaggaacatccaggacagaaggatctagaggcccctgggcttagcaggatgtaccaggagtcatggtgcagtgcctggcctttgtcctgagggcacaggaagggaagtaagtagagaaaagtgatcatatttaccttcagagaggaccactttggctcctgtgtggataatgaataaccatgggtgaactgagagagggagacccttataagggctctgtggtgtgcaggtgacatgtggtgggaagtagattctagaagtacagcagtggggagtgggtggagctgaaaggagtgaaagagagattgacagatgagtgagtcactgaaagtgggggctgagaaggagggcagagtgacactagggtcttggtggggtgggaagtggtttccccaacatggggacacaggaaagagggtaggtttaacaggggggatgcagctcagatgttcaattttggacacactgaattcagagagtgccaatgagacagcacaatggagatgccatgtagcaggtagatatatgagtttgcagctaaaaataaatctgtgctgatgataaggtattataggcacctcttttattggatggaacctagtgggtgatttgattcttgccagcatagcatcatgaacaggggtcagggagtacacctagaactttctgcaagtaggtccatctttctttctctctctgtgaccttcaccaatttatctgcctttctgggctcccctagcctcagcataaaatggtgatagttatgtctacttctgactaccagtagcacaggtttgaggatccattaaactgaaaataaaacatgtggggctcgtagaaataagaactatgttaaaacaaggagttattatagttgtgcataagccaatgaaaagcagaaatacagccccaaggctcagtattgattttggtcctgggtgcttcctgcggctgaataaatctgccatttctcccctcgagtgctggctgagctgatggcaggtctccagctcccagcctccttgcccctgctccaaggttatgtccttccttggctcaggccagatccagcatggccacacctgcccctgctcctttggtcacccttcccatgcaggggatggttatggggaagattccggttgtgaaattggagcatggctagcagcagatgctctctgattaaactggggacaggtccccgaggaaagtggaacttggatctgcagaacaaggaatttaaggaggacaaaggaaatggccctagacagggctttcatacttcaggatgcatcaagggttatggaatttgcttcattcattgaaccactggataaatatttgttgagggcccactgaatgccaggttctgagattagctcagggatacaggagtgaaaaagacagtgtttgccctcttggaattaatattcaaattgaggaagagagagataataaacaaaggagtaaaacactcttgaacgactgagcaaccagatacaacaagagagaatgctgatgtggctgggagggaagtgtctatcttagaaggtgtggtcagggaaggcttcaatgaggtggtgacatttgagtgagacctgacagctaagaaggagttgccctgtgaaaagcagggaaaggaacactgtgggcagagagcctggccagaagagaggacctgtggggcccaagcttgctaagtttgcagaaccatgagaagaaatctggctagaacctagggaatgaagggcagaggtaagggaccagatggtgcaaagctttgtgagtcatgggagggaatgtgaatttttgttttactgtcatggcaagctattgaaaggttttatttaagggagtgatttctattttaaaaagattgctacatatatacaatggagtactattcagccataaaaagaatgagatcctgtcatttgcaacaacatggatggaactggatatcattatgtcaagtgaaataagccaggtatggaaagacgaatgtcacatgttcttatttatttgtgggatctaaaaatcaaaataattgaacttatggacatagagagtagaaggatggttaccagaggccaggaagggtagtggagggttgcagggagggtggggatggttaatgggtccaaaaaaaacagaaagaatgaataagacatagtatttgatagcacaacagggtgactatagtcaataagttaattgtacatttaaaaataactaaaagaatgtaattggatggtttgtaacacaaaggataaacacttgaggggatggatatccaattctacgtgatgtgatcattatgcattgcatgcctgtatcaaacatctcatgtaccccctaaatacaaacacccactatgtacccacaaaaattttaaaaagagaaggctctcttaaaaaaagattgctctcacctgagtggataatgggttgcaagggaaaggaaagaaggaaaccagccaagaagcaccgtcgttcttcacgtgagaagtgatggtcttgtggactcaggagtatctgtggaagtggggtgaagtgggtggctccagggggtgttcgaaagtgggatggaccccctttgctgatggatgggaggtgaggggcgaggagatggatgaactggagatgacttgtggggttctgacttaagcagccatgtggatgcggatacattcactctaacagggatgaaaggagaacacagaggcatggaggacatccagacttctgttttggcctggtcacagatctgacgtgcccgtggggcattgaggagatgtaaagtatgaagctggaggtacagtcagaagtcattggaatttctgggctggaaatgtacctggaggatctcagcataggactggacttgggcacctggggaaagggttttgggggagagaagagggataggtctgagccctaagaagcactggaatgtcagcaggaatgatggggggagcaggaaagccaggagggttggagccacgggagccaaaagaaactgctcagaggccacactggggaggatcgagggtacccactggatctggtgacttggaggaggctgctgatggtgacaagtcatttcagttagtgaggatgaaaggcagattggagtgggttgaagaatgagttggaggtgaggaggcaaaagtgacatttagggacaactccttggagagatcttgctgtcacactgggcagataaatggggaagtgctgcttacttgggtttctatgaacataagaaacagtctcttcatcatttctaaacctctctcccactctgatgcacccacccacagcattccatgataaaataaaccgtggatgatgtgcagtccccaacatagtagctgtgactccattcctttttctcccttttgagaaagtttctaggaatgcaaatcaggcagagtaatgttgggaaaaccacagatctgctgacttccacacattcaactattatatgtaaccaaattatttgtagcgcaacttattattgatcacaccatacattattgttggcatgctggctgagatgtgttgttgttccagacatggttgggtggcattcattcattaaatcattcattcatttatcaaatttttttgagcactaacaatgtgtcaactctgggcactgggagaagtggtgaacaagacaaagatagcctctgccctcaggagctctagccaggtggggaggcagacatagagtaagtgatatcagttgagcttacagccagagaagcactgtgttctcaaagacagcatcactgcaggtgctggcctggtccacaggtgtagcaagagtctctgaagaagtgaggatgaataagcagagagcagaattaatgagacttgtgctgggactgggtatggacagcagcccaggcagaagtgaatacccaggagtggagggagcccatttccactggggtcagggccagcccgtccagaaggtcagaggaggagagagtggggtgagaggcggggtccagatgtgcggggcctgggggctccagccaggagattggtctttatcaggaaagcattgtgaagaattttgtgttgaggggagaggggtgatgggatggtcagacttgttctgaaagagcgctcaggtgtctggggaatggggtgtagttgtacagagaaaggtgacaggccagtatcacttgtatacaggcaggggaagacattaagtcccttccagccctatttcaccaaacattgctggtatttggaaacggggtgggggatggggcaggaccagacttctgcttctcagtgttctgtccctgtagcctgatctgtttttcctctctcccctccctcccatctaggggaactcaacaggttagtgctggggccggttctcaaggggcaggacagtggtaagcatggcatagggcatgggagtgcagagatgcaggtgggtgcatgacttgggatgggcagtgcagatattcacttatccagggaatggcaggacggtggttatcaaactttgccatgcataaaaaacgcctcgggagctcattaaaagtgcagacttggaagctttcctaaggaatgctgactcagcaagtggggcggtggggcaggaatcatttttaggaagttcgcttctctctccacccaggtgattttgatctagataacccgacggccttccttttgagaatgcctccatgctggcctgcgtcttggcctcatatcctcagtcccctcttctgtctcgcaccagcctgggcctgaaagctgattttagccctgcattaagatgtgaatgacccaggacataggcgtgggcaaggacttcatgtccaaaacaccaaaagcaatggcaacaaaagccaaaattgacaaatgggatctaattaaactaaagagcttctgcacagcaaaagaaactaccatcagagtgaacaggcaacctacaacatgggagaaaattttcgcaacctactcatctgacaaagggctaatatccagaatctacaatgaactcaaacaaatttacaagaaaaaaacaaacaaccccatcaaaaagtgggcgaaggacatgaacagacacttctcaaaagaagacatttatgcagccaaaaaatacatgaaaaaatgctcatcatcactggccatcagagcaatgcaaatcaaaaccactatgagatatcatctcacaccagttagaatggcaatcattaaaaagtcaggaaacaacaggtgctggagaggatgtggagaaataggaacacttttacactgttggtgggactgtaaactagttcaaccattgtggaagtcagtgtggcgattcctcagggatctagaactagaaataccatttgacccagccatcccattactgggtatatacccaaaggactataaatcatgctgctataaagccacatgcacacgtatgtgtattgcggcattattcacaatagcaaagacttggaaccaacccaaatgtccatcaatgatagactggattaagaaaatgtggcacatatacaccatggaatactatgcagccataaaaaaggatgagttcatgtcctttgtagggacgtggatgaaattggaaaccatcattctcagtaaactatcgcaagaacaaaaaaccaaacaccgcatattctcactcataggtgggaattgaacaatgagatcacatggacacaggaaggggaatatcacactctggggactgtggtggggtggggggagtggggagggatagcattgggagatatacctaatgctagatgacgagttagtgggtgcagcgcaccagcatggcacatgtatacatatgtaactaacctgcacaatgtgcacatgtaccctaaaacttaaagtataattaaaaaaaaaaatagaagtaaattaaaaaaaaaaaaaaaaaaaaaaaagatgtgaatgaccacgttccgggctggggcggccgggctgtcgggcaggcagcgcgcggccaccagggggcgccagagccttggctcgcgcgctcggcctcctccgcccgcggacgccgcgcccgagccagcgagcgagcagagcacatcgctgcgggctcacaaagcggccagacgctcggcggcggcgtgtggcaggagcgcaggggcgcgagccggcgatcagccttcccggcgaccgtgccgcgggagctcgagcaactcggactaggggacccgggccggcccccaaggtacgtgcccagaggaaccccgcgccccaacttggagtagttgggacctccccgcggccgcctagggggctggcagggtcagggcctggggttacctccgcgcgcctttcttacccccgagacctcagggcgctcaagggagacctttcccttagctgtcgccggggacccccagctgctggcagcccccaccccgcttgccggagctcgggtgctgctggagccctgttctcccctctcctgccccaaagccgtgtgcaccgcaccgtctgtgggagtgcggcgtgcggacccgggctccccgcttctggggaggggtaccaagcccctgataggagggcggcatctgtggggcactcggagaatagacgagacgggtcccctgtagttggacggcagcctcggattcgtgacgcagcctcctcgttcgtagatgagtcccccattcgtgagaggggtccctgggtctagaggcgcgacaggcgccccaggtgcgcgagcgctgcccgtgcccgccgcggggtccccgcctccgggctggggcgctgggacgcctgggtgcccggggctcgcggccgcccgccctcttcgctcatcgccctgcgcgccctgccccgcagatgccggcgatcgcggtgttggcggcggccgccgcggcgtggtgcttcctccaagtcgagagccggcacctggacgcgctcgccggaggcgcgggccccaaccacggcaatttcctagacaatgaccagtggctgagcaccgtctcccagtacgaccgggacaagtactggaaccgctttcgagacgtgagtaccggcgccacccggccctggggggcgcggagcctctcggaggggacccctgaagcggggttggggtgtgtgtgtgtgtgtgtgtgtgtgtgtgtgtgtggttgggagggggacaggtgggcatctcccgcgggggctggtcggtcccagcttcctgggtgcggtcttgcctgaaaggaactttaaagagaacttcgaaggctccatgcgcttgcctgttacctgtggcccaggtgtgtgtattcgtagggctgcgggaggtgactgcactaaaatacagcacagatcaccagtagctgtggagaaagaggttctctgagcttccgacttctcctaaccgtgatggtagactttccctagctccggagaaaacctccccggggcagcggtggcgtggaccatctctggggtgtgtcaggagaatccctactggagaggttgggtctgggagtggtccaagctatttatgggggagctatttatgggagtcaggtgttgcatgtgtgtgtgtgtgtgtgttgagggaggcggtcatggcaatgggcctgataaaatacaggggaggtggggtggtttgaccctcggaatcttgaaacaggaacaactagcccgtgcagttggtcccctgccctgaaagggaccctgggtggcagagcattgctcctccgtgggagccctgggagtggagaaagttactcccggacacgcagaaacacacttgcggcctgtttctgcctcaaggctggctgccactccccaggtgtgccccagggatgtggggcaagaggcatctggtgcagtctttccagcagatggcatctcctctgttctgtgggagcgtctgccagcttcttcaaggactgccccagctggccagggccatgcccttctaggggacttgggagtaccatgttttatggtacttaacattaggaattcctgtttctgagaagccttaaatattgtaaaagtgcccaaggcataacagtaaaaaagagaaaagctttaatgttcaaaggcactgtttctttttgtttgtttctgatcagttttaggtgttaaactaatatttttagcagcatgtattttttaaatatgataatttgacctataccacagaccccctttgttaatgtccccgggcatggtttacagactctttgaggtgggatatgtatggggatcagcttcctccactggactcctctaagctctgctctcagtatctgcaggccttgcagggagagggaatttgagacattgaatgaatcccagatgtttccatacactttttaaagagcaccctctccagatccctgtccagaggagatgcactcatagctttgtgtgggggtttatcactctcctctctgttcctcctcttcttttttctagttgatgttggactgcttctcttggaaaggggatttcaaacactttcaatgaatagccacagctatttggggccttttatcgaaattgtaatttcattaaaatttttaattgatacataataactactagggtcttttgcagtagatatgcccctcactttcctcccctaccccagtgagattcctgccattcattgccccattcctgacctgctctgttaactgcttagatctgagaatccttcattgattacctttccctatggctgaaaaatgtgcccaaaccatgaaggattcacctggggcagagataattttgctttttgttttgttttgtttttacttttctatggctatcttttagatagagttgaagagcagggcagttgcttgactttgctagaggtggaagaattgagccaggattagaagtgaagggccacctctggagatagatgccttggtgctcctggcagctggattgagttgaaaacacttgtgcttttttggatctttgggttatggaaaggtttactgtgctttcatgcctgttcaagattttctagtctcagtgtatcataagcatgatattctgaattcctgcttagctttaaattttttaaaattgggcttctgttcatttcccatctttattatggatggtggtgacatttttagatctttggaacagtgtgtttccaaacctgactgaggatgaagctcacctgaagtgcttgttaaattatagcatccatggtcctaccctggagaatctgactttacatttctggggtgagtgcagggaatccatattttaagcaaacatactaggttattctaatgtttaggaaatactgcctttagatagtataaaaatgtccaagacataacaaaaagaaaagcttttatgtcccaatacactatttttttttgtttttgtttttggagcggttttagacattaaactaatatttttagcagcatatatttaaaaaatgataatttaatccagcatgccattaaaacatctaaaaatgttcaaaaaaatcccaaacttcttcattcatcacccattttatgtgctgtatggagtcacctgacactaacagtggctcagacataatttaatgtcattaacctctttaaagtgttgtggaactcagaccagacactcttttagggcaagtccctggaataatcacaaagcctgagcctgggaacagagggtaagaatttgctttctacagaaacctactattcagtggacaatcgataaagcctcagctaatcttgcagttgctcagccagcctaatcattttcattgagccaagccttgcttgaggttgacaaagcctcagcttctttgctgtttctttgttttgttgaagctactgataactttgaaaggctgtgtcccacaattattgttatgatgcatgtcaatttttggaactcattgtgaaagaaaacttcttgccttcctcctgacttgtctctttgttggacttgggggagagattcagatgtgatttttgaaacttggaaactgaaaactaagggctgctcttagagagttgattgtagcccttgggtgttgttacagggtcaactttgaaatgaatatgacagtggggtgcgtgttccatatcccttgactactgggtgtgctgtgacattgccagaggtgacctggcaacctctacttatcattttgaaaagtgtcctattgctctagatgtataaatacttcctatccccttctttttagaagtaaagcctttagaacaactccatggcttattccctggagttacagatccaggacaaatagaacaatgctcagatgattgctcctaaatgtatttgtggtctgttagttttgtcattcttcttttataaacactagcaattgggaagttttggccagatggaggcctggacttttgtacacaatgttaaggaggcgatgaagaagcagatctttgtattaagttgttcaataattttccatctttagctgacatgcatttaactcctccatggcttgaggttgagggatcaagatgccacaaccattctcctaatttttctgcatctgatttggctttggctttccataaccattaccataaggaaattttcctctgttcatttgtaccttcattcattccaacaaatatttatctaccattgactaggcattgggttataagagtgaacaagataaatacatgtaatctcttctttcatgtaacctcttgtctgctagaggaaattctttaacttatgctgtcatagactacttattctgttttcttttaaaaaatattttttctagaaacataatacagtctggttgtaactaaaagattaaaacattgcagaaataggtaatagctaacatttatggagcatcgagtgtgccagacactgtttaaggtactttccatgtattatctcacttaatattcataacaatcctatgagagaagtacttaaccctgggaggttaagtcttttgatcaaaattagagctgagatgtggaggagctggggctggaactatgccatctgactctaggctccctctgtaccacagccaatcaggggctgagtggatttggggtgcaagcctccactgatagcacattgcaagtttttcctgctttatgaatgagggcaacccgtgaacagccttaggttaagacagagtgggatgggaagtcagctggacacagtgtattgtgggggtcatgtcagggcttatcttctaataatgagcttctgatttgattaaaataatattgttgcttacaccaaacatgacattttctttcttttgcacacatgaaaccctgacatttaactttaggataattacctttagcgggcctgaagaatcagaagtgctgccttggctggaatttatcttactgtggagtgacctgagtgtgtaattctaataagagcacaaggaccaacttctgttctttttccttctggcacatgctctgtgggatttggtggtctttgtagcagagctggggtggcagcgagcatctgatctgctcatttgatctaacatatcagctataatgagtttcaagggcaagtggagcctattgataaaatagtggctggcccagtcagtggggctggtgacaaaagaggtggtatggcttagtggatcagtcattaatctgtcatcacggaaactcagcccgtaatcgagagtagcagaaaatcattttgattaaacaggttcaaggagacttaaatgagtttgtgatcctgactctctttaatgaacccactatcttaaatcccctgtactagctgaccattgatagaaataattatttcacagggatcattataaagggacagtttaaaagttgataggcctaagagccttcttgtcttctctgtccttaccttcaatgtgcccttgccagagaaaagctaagtcttctcagatggcagagctccttgccccagttggccttcccaggcctctccatgatacttcagcagaactgtatcactgggaggataagtgctctcctatattctgatgaggccagtttcaaaaccaagaagtggctccaaatggataatggacccgtaatacttgcctagaggagtgggacctcatcattcgctcaatcactttgttacttgaggaggcaaaataatgttagtaattaaataatgtatcatcatttcttattgatttactcaatataatgtgtttcaaaccaaacacaataactaaacacaagcacattcaggatgactcattttacctttcctgtggtgaggtgactgcctgtggtccttggaaaattcataagacccagattatacttggtcttatctctccaggtgagatagttacaaacaaaataaatttcctgtaagagattatgtaattcacttaaggttataagtatttgtccatcatgtttcattcggtgtgagatgccaccaatggtaagatgcaccattttaatgaaccgtcaaggagtaagacagtgcccagtgtgaagagtttaatagacctctggataaagctggaattccaaagggctacactgtgtagaggtaaacaagaaatgaactcaccatgaagggaaggggctgcagcaaggctacttgcctgtctccaccttccattggtggatggagagaaaagacatggtccaagcaactgagcagtctggcactctcgcaggtttctggtctacatgcacactctcattgtgccctccccccataaaaaacttacacagttcatttaacttaaagcaatctcagattatttatcatctctgggccactgactcatttgttaagaaatgataataatattcctttggtgaaactttagattgcaagtgactgaaatgtggtccaagctggcttaaatggaagagaaaacatactcgcttgtataactaaaaaattctaagaagctgtggttttatgtaaggctggatccaggggtcaagttacatcataggactaggggtttgtgtgtgtctcattctgtctccctgctcctatgttggttttgtgctcaggttgtttggttccatgtagtggctcatggcaactgcaaatctgcatcatcatagttttcatgttctcgatagtgccaacagaagtcccagaactgagacttgtcagatttcccggcgttaggcacccattcctccgtcaatcactttggctaagttggtagagtgtgctgattgtccaagtctgggttatgtgtccaagtctgggttatgtgcccagggctggggcctagggctagagtggtggaggggtttcattggatcccactgttgatggatggtagaagggtaatttctcaaggggaaatggatgcctgatgggcagatgtcaacagatgtccactgtgttgaccaagcttatgggtttagcatgaagagtaagttggttaatgcaggtgaagctcttagcacaatgcctggcatcatagatagcaagtggaggctattctttttattaatatcaacaattcctatagcactgttatgcagtattccttgatttatagttgtatatatctacattttagcttatttaatagttggatgcctcctgaagaacctaagtcttgtcatgcctcacacacagcaggtggccaataagcattttgttgacttgaattgcctcctgagcaaacctcttggatgaatctgaggaaggaaagcttttagaagcatactaggcacatgtgtttatagtctctgagaggtggaaattctcagggtcacacatatcgaaaaactgttttttagtctaactcctatctctaagccaggacctcacccctttgtaattccttttaagatacaccattgtatatagcttggtgtcctcagacctttaccacagagccccactcagaaagctgctcattgaatgttggaatgaatgaatggctgagtgcactgtcccaggccagaactttccacacctgtggcaagtggaggggttcactgcagagggctgtcatggcagagtgagtcatactagcttcgaatgtgtatgtctcactctattagtaattgaaaatgatgatggataataacaaatgcagtgctgttgagaggcagagggaacccagcagggaaatgcaacccccctcgcaattccagcacaatctctgattccgtgaaaagctctttgaggctgagtcatgtcatggtgtaagtgcccactattaacctgaggtcacgttccagtcttgccaaagctaagcttaggtgtttggctagagcatcagtttcttctgtaaaactggaatggtgatacttgcattgtggggctctgggggaggactgagtaagcacgtggcacagagtaggtacttgtgatctttgagtggctggtatatctattttaattcgtaatgatctataatcatttaatttaagggagcttcttgtctggcttgtgagtgtgagttgttggcactcagctatagatgctgctttctgtctcttagaaacatgttgggggagtcagttccatgatcatgagcctgtcttcactccatttcttgccagtctggaaggctgtgtgaggttccatatggcccattctttgttattttccagttgtagctcctggcacagaagaccttgccatcatattttatattcttgctggacctcctcccccaaaactggcaactctcatcatgacgtaactgggagggggtttgtatgcaactgtgtctgaaatccaagttatgcgaaggttgctcttgggagccccgttatgcaactaagcactacttggtgtcactttaatgttaagctctgatccagttgcctccagctcacctcaagaggtagaaacttcatcttgtcctgccagagaggtctcaggcaggctttatgggcaccaggggatgggatccattttgagacaaatgatccaaccggcctgtgtattactgcggcgttctcagcacgctctgtatgtctggtgcccataatttggtcttgattttgcatcatgttggcatcactatacttggggaagttcttgcaggggctagcacctgcttcttggcactcaggcagtccccaagctccagatttggctttagaaccaaaggagaatactagtagggattagccagacctttgatccttctctccaaagacccagttcttcagttccagatcattatgggtcgtcagagggcctgtcattcactacagcccaagcaggttggttgtggcttaggagaaacccagcaataacaaatagttaatgcaggtagggtaatgtgttgtcacacaaatgttcttcaaatgccagctatgtgccaggcctctgctaggtgtcgggtgaagaagatagacacatttgtaccttcctggcatttatggtctagtatggtagacaaacaatcacggaataatcatttatgttcctttgagaaaagtactacaaggcagaggcaccgatgctctcagaatatgtcatgggaagagggaggaggaacccattaacctttttggctggggactgcttccctgggaagggcattgaagctgagccctgcaggaggactgcagtgaaccaggtgaggagaggccatgggaagagtgggtccaaaggtcttgaagtgggaaagaccttgatgtgtttccatcagatgtgtttgccctagtgttcccttaagtagcaagctctctcctagtgtattttaaagcacacttcacacattttcaacttaacacacatttgggggcaggggaatgagtcaactgcaaaaagtgaggcacacagatggcccaagtacttggaaggatggcctgttcttttcctctcctctttgtgcctctctgtgccatcttctgcagccatctctattgtataaacatccctcactctggtcccccacttaatccttcctactcctctggtgtccatggtctggaagtttctccttccctctgtggtcaaatgtcctgggctttagagctcctacagttcctactgctgtttagaaataagaggatcatagtgtttcttggtcagagtggtgatctgtggagtttatattttaaaaatgagactagtatacatggggttgctccttcagctcctccccttaccttttccccttccactgtcactttgaggctaaagatgaaaagcaagacattcatctaagggatcagcttagcggcagagatagacacgcatgcacttacttcagcaccacatggggagtgtgtggatagcatgtgcaccttcttgcccttgggtctgagtctgcccattgttcctatgacagacatggggataatggtttctttttggggaagatgaaagatgcattcacagactggtgatgtgaattattggggatccctttagaaggataatgctaagatccaagttaatttgatttggtagcttttctcatggttttatgaaaatataccccccagagaccctctcacttcattctcaaaaacaaacttttctttggggaaagggaggaagggcggacatattatacaaggatttgtaatgcttctgaaacccttcctgtgtgatctgggacacatcacactccagagggcaccgtcaacattccccagcagaattatgtggtaggtgagcaggcatttatgcaaagtccgtcggcgcctgtgattggagcagggaagtggaacttactgcaggtgttccaggcaatctttgcccaaataaaacatggagaaaacaaacatgcagagagcagaggcctctactttttatttcagctgtactcgtctgtcccgccgtgcaaatggagtcacgctctaactcaattctgagaggcctggccaagacaaagagaaaagatgcccagagcggtctgttagagtggcattctcagactaatatctttacagtcttgagaaatcactgtcagggtttatttaaaatgcagatttcatcctgctagtccagagcataggctttagcaggtcaaaggtggcacccaggaacctgcattttaaatgagcagtccaggtgattcttttttttttgaagacagagtcttgctctgtcgcccaggctggagtgcagtggcgcgatctcagctcactgcaacctctgccgcttgggttcaagtgattctcctgcctcagcctcccgagtagctgggactacagtcatgcgccaccacgcccagctaatttttgtatttttagtagagatggggtttcgccgcattggccaggctggtctcaaactcctgacctcaagtgatccgcccaccttggcctcttaaagtgctggggttacaggtgtgagccactgtgctcagcccaatccaggtgattctgatgtaggtagttctcagactgtatttttaggaaaatcctagagaattgttatccatcccaaatagccaacaccatttagctgcaatgaataataacattttagacaaaatgagcattttattttgaagacttgcaataaattaatatgagtgcagtattttccccttatgccaacagggctaccattcacatcagaaaaaatggtcttgttttccaatgtgtgactcaacataggcctcagcaacagctattgtcatgaggttttcctggaatggaataacatttgggtcttgattggctgccagggcccagggatgcttgcacacatgagcacagtggaattgatgtgggaccttctacatgatgaaattccaggggatcatctcagcatatttgtctccaaaaggcttgattctagctaactctggcctgactttgtatctaacccaactgatatgttttctgcacagacgaaatgaaggaaattgactctgacgttggctttagtttatagtgaaaagaatattgaaactgaagtggtgttaagggtatggaacaaacaaggaatggtggatgtaataaagaatgtttactcttgggcactgagatgcagatactgatagtcggaaccacagagggagtctgagacacaggggctagatggtgacattacctgatactctctttttggtgtagtcagttcttttcttggttggccagaggtttttttttttttttttttttgaaagatcagaaggcatccactcccctgccccctaaaaaaggactcatcaaagtttagaaaatttatgagcatcaaccagacttggcagtattcctcattctgaagtcattctattcccactgaacaaactctcaaatgttcttttccccagctgcttgaatttcctttaattaatggtaaattcatggcacctaaaattgattaaaaaaaattgccaagaggaagaaaatagttaagtctgttggacagactgttgtggctatttggaggtctttccattgttccactgttaggggaatatggggaatttctggatctttccatgcttattggacatgatgattccctgtgacttctgtggacgtggttggcttgtgtcagtactttcatctggccaaggcctcacttcccatctgagtcagccagccttgtcatgactctggacctggtctggagcctttgtccagccacctggaatgaggcctgcatcacttccaatgactaagacggtcaaattctatccacagtaaagataaaataatactgtgtttactgttgttagagaaattgtgagatttttacatgccagaattgttggtttaaaaattcctatgccagaaagaccttttcatgtgttttttggaatattttgtttctttgcatggccatccaggtcctagatctttgcctttttagaaaccagatcctggtgcactgattcagtaggttttgtttattcgtgtgttcataccaaagatacttactgaccaggctaccatgtaccaggcaccgtgctatgcacttaggatgtagcagaggggaaacaaacatgattcctgtcccctggtcaggctgcaggctttctatttgcgacaaagtgaagagaaagaggtgcttggaggtcagggaaacctgttggggatttttctgcaaagaaaagggcctactctgcaaatggcccagagcagttctggcgagctgggcttccagaggcattgtccttcttgtgatccagggccatgtctctgaatctttctggtggtcaggtcacttcagtttgcctcaactcttcctggcatacatgggcaacttctgtcgttttacccaattttatgggtacagacactgccaacaggccaacaggaaggtgctggcctgtacaatcaaggtggagagttcagacaagacagaacttgtgtgtgcataaatgctgaagtatggtgagtttagccttgtcagggctgttggtcgagggctgtagtaaatggaggaataattatggaaaacataccctgcccttagcagccctggattggtagggagtgtgtttcattggagcatagcatacagagatcgaaggtgcacattataaatgtcccacttgatgcagtttctcaaagtgaacacacccaaacagccagatcaggagatagaatattaccagcatctttgaagaccatctcatgcccctggcagtcactgacttctaacaccataggtgtgttttgcccattttcttacttgtataaatggaataagtatgtacttttaaatgtctggcttctttttttttcaacattaaatttgttgtacttttttttgtgtgtgtgtttttaaaattttcattgcagtataaatattccacaatttatttacctgttatattgttgaagggcagttagtttccagtttttgtttattacataatagcactctctgaggcatgtcttttggtaaacccatgtacacatttttctcaggtacacacctaggtgtggcaatccactggtcactgtaagacaggtgagtgtttaacttaaagagatgcagttaactagttttccaaagtggttgtgccaattactctttcattcatatatgaaggttcactgggagcaatgttttttgattcactgattgagaaattaaaaagagaaatcctataatctagctcatacatccaattcaacaaaagtgtatcaattacgtgtcagacatttgcctacccttatgaaaattatgttccagttgaaggagaaaagcaacacggttaaagatacaatggttggttttaagtgctagggacaaagataccctagtatagagggaatatagaggggatatatttatgctgtaatggtgggtcttccactattcttttgactttacattgttcttttccgaatttgaagaaatagataatttttaaaaaagaagttagaagatacagaagagtgaaataaattattccctccaaaatgcactcaccttgaacactttttgggaaggatctatttgcctccagtagacttttgaatactaaaatttttattttcgtggttttattatcattgctgtttatcattataaacagcatattatcatgctgtttatatgatttggcgcgtcttttttcatgtaacaacacaacataaacattttagtaaggtgctattctttgtaaatgacattttaatggtgtttttgaatccagtgagtgtatatgctacagtataccaaactaaggtatctgatggtaggcaattggttgtttctattttttccctattctaaataattgtgtgacgaatatttttggttatatgagtctttctacatttacaatgatttccttttgatatatttccagaagtagcaatgcttggtgtgccagcacatgtattttaaagggcattgatgtttgttgtcacgtggtactgattctacccttggaactgtagaatatgtgttttactgcaacttttccagccacgggtatcagtgaattttggtaaagaagaagaatttgagggaaacatggcatgccaggttatgtgcaagtactaaatcagcaccagcacaggtaaggtgatgcatgatcatcagagtcccgattgggaggaatgttttcctgatcccacttgagttttgtcagggaaacaggtgtgagagcccacagctcacccagagctggggagcagaagctgctgcccttcctcatgctagtgcctggccttgggaatgctttgcagggcctgttctctgaagagccctttgaactggttgtggggatattaatgaatctcagccttgttcctaattaggagcaggagcagatgctccaagctggattttaagtgaaattgctgctgatggatgccctgctcctggtgcaatgtatagatgttttaatgcccttgtggtggaggaggttgagaggggatcattgaaaaccaagtccattcccaccacagcggtaaagtggtttttcctgtcgaatacagacaaggcttgggcccgcatctcagtcttcatttgtgttcaagacatctacttgattttcattacccaatgtttcctcccaccgcaggcttgtctggtgcactcacctcagagagcaggcaggcagaagggcttccccgggtgctgtctcagcatcatgaacgagacagaaaacacaacagttctcttggtctgtgtcagctctttgggagttctctgcaggcctagagcagtgattcccagccaggagattttgccccagaagacttttggccctgtctggagacatttttggtgccatactggttggagagtgtgctactggcatctagtgagtagaagccatgggtgctgctaaacagcctacaatgaacagggcagcctccctccaaccccaaaataaattgtcactagggtcaaggttgagaaatgctggcctagagatacagttgctccttttataattattttttaatgtaagatatagtccagctggatgaaggtaagagtgttgttcatttgagaaatacatgtgccaggtactctcctaggctctgggacacagctctgaacaaaacagacaacattccctgcccttatggagcttacattctagggcatatggctcctcttgtttgtgacgtttgacttttccagagccaagagaagggagggctaactgaacaaatacattactttttattttttatttttatttctgggatggagtctcactcttgtccagcctggagtgcaatggcgtgatcttggctcactgcaacctccgccttccaggttcaagtgattcttctatcccagcctcctgagtagctgggattacaggtgcctaccactacgcctgactaatttttgtatttgtagtggagacagagtttcaccatgttagccaggctggtgtcaaactcctgacctcaggtgatccacccgcctcggccttccaaagtgctgggattacaggcgtgagccaccatgcccagcctaaatacattactttttatatctcaaggaagtttgacagattattacatccaatcaggtataataaagactgtatgatttttattatttttgccaagataaatggccactgggagatgttgtttatttacctatgagttacagtaaattggctgcactgtgaatcagagagcctgtttgattttgttaccctgaggagtaggaaaatgcagcataaaaatattgcttttccccaagagaactgacagtctccagatggatgggctgggtattctcccttgattcttgtttctctgcacatcttgggtagtatctgttatttccaacgcgatgatccttgttcacagcttgcttctttttcatctgctgcatggcaaattttaatgacccggtcccctgaattctgtagcagtgacagccagtaccacatggctgggtattggggagcatgttcctcaccctggttcccgtttggtcggtttgaggcacacttggattgtgaactcctgtgttccaggccttggctcctgtattgtggcatctagaagcctctctagatggtcaatatacatttgaggctgtgctgggggagcatcttctctttccctgtataattctaatatctctgccttggggtgggaaaggggacatggtccataacaaagtgatcaagcccaccagcctctcagaggatgtctgatcacgtctttacttctggttcaagtcatctgtgagtctacatcaagtccataggatagtggagatggggaacaaatgcctctgctctatttggatgtttctacagctgctgctcatggatgtgaagtcttagtccagcattatgtggtgtaccatgtggcccatgccatggctggcagagagagttcctttgggcattttctgcagtttccccttccctcccctactttttattctgtatccctcctcaaatcctcccaatttctatccccgacatccagcatgggttgctatctctgccctggccagtcacttgccaggtaaaggtcagatgtcttaggcatgggtaggagtatgggagaaaagtcttttgggtccagtctgaaaggcccctttccctttaaatattaacttcctgccaatgtaactcctgagcaattctaagctaaagtgtatctttctcctttccagtcttgagttaaagtttaaaggcctactgagctctttggcatactttagggggaatggaagacagggaagaaaacctgtaatgtcatagccttagcctgctcacttaccgcagcttggcaggacgccatcctttgaggtgctcacacagacctgcagctgacgttgctactccgtgacccatcatccaacaagagaccttgacactccagggaatcttctggagtaaccttttaagatacttgttatagtttttaaaatctttctcctccattcccttccccactacagagttagtgtttatgtgaaatgcatgtaagactgaccagcagaatggttgagcttctgcagaaataacacagatgttgatgcacaggcaagaaatgtggtttatgttttatgggacaagggaagcagataatcattttcttcccatatttttgacctagtaaaattttgagtttgagagatgctagactgtcttaattgctgaatacttgtgtgctaggcatggtaccaggctcaggggtgtgaaattcaagactaaatcttggctgtaaggagctaaggctatacttggataaacaggtaaatagctgtaatacaagttgatgtgaggggaagcataggacaccaggggagcctcagggagggtcatacaatcccagtggagaggtcagagaggcttgcagagagagagaaggcatctgctctgaattgtgaaatgccttttggagaagtatcagaggaagagggcgagggggagaatgatgcagaagaatctgtcacccaaataaacctcagagcctcacacagccagggctttgcttaaagttccattcacaggtgcacatccaccagccaaaggaattcgtgagaagtttcagtttttacttcaagtaaaaaatattaaagaatactcaaaatcataacccacaatgaaggttctcaaaagctctgttttcctcctcttccttctcctcttcctcttccctctcctcattcttttggtccctttgtatgctcaggagtctctcttatgacagcagcataaaactcttctccttagccaggaggtatttgcctctcctggttaaatacttcccactttcccctggcttcttaggtgctcttctaccctcctgacttccaggctagaaatagatacaatggttctttagagggcatggggtgggtgacgtggagtggggagaagttggggaagcttgacatcttaataaatctcctccctgtcacactcatgggccatttggccattcagtgcccatcctctcagtaatgatagttgggctctaatccacttacttctcttggacacattattttcagacatcctaatctctctttcccagtgggtgtaccttctctgtgcaaagcaaaacaactctatgtccaagagaagcaggaaggccacataataggattagtatatcacagttggtagagccgattagaactgattgtcttggggcaatattgattgtcttttggaaattatttcagtaatacaagtgaatgagtgtgtgtgtgtgtgtgtgtgtgtgtgtgtgtgtgtgtgtgaaggagagcaacgtgaacagctgcagctttctaagaccagtcataaacacatgtccttgtttaccaaacatgtatgggcagccagcgtattgaaggaatttcagttcgggaaataaacatgaggcagttttgtttatttttaattgctgctttcccttaataacatcttggcagattgcataattttctatcatttttagccttaaaagtaagtccagttgagtttacaacttccatcttacatcagatttggggttttctcttcctgttcccctgcacagtcttgacttgtggcttgaggagtctgagtggggatgaatgtctgattgattatttaaccctcttcctcccaggcttaccatcaaggtatgccctctagagggccaggcaggggacttgcctactatataatttcttgatgcagtggtttgaatccaggtcaacctcttccttcctatcccgcttttatcagttaggacgggttaaattatgctgtggtaaccaataactccatgttaatcacacttttgcttaaaacaacaaaggtttgtttcttctcatgccacacatctctcatggattattggtaggggctctgatctgcgttgtcccaggacaccaggctgatgaaggctccatctccgtgcattcacaatcactgtgcaggaggaagagtgtgctgtggggccttgcattagcaattcagtgcatcttcttagaggagatgccatttttgagagccaggtaggtcacatggccagacaccccatcaatgggccagttaaaggtgatgctatcatgtgcctaggaggtggagaagtcacatgcttggccagtggtattaatactgtcccaagggcatccccttctggggatctatcctgcagagttatgctgctaaagtcctctcacctataggtggtcctcatggacggatggatatgcatgcagtggttccagctgagctactgtttatgatgctccctaaactctcattccttgctctactaacccatggggacagagacttccctaatgctgcatcttctctcaatttggctagacttcttgaatttccttttctctgttccgttagtcacgggacagataaacaagctcgctgcctgagaaaaggcccaagtggagaaacaaatcttctcttcttgcaggtgctccagtttttgagcagttctcctatctagtatacccttacacggcacttgaatgggaacacacctcggtgggaaaacctggtgaaccttgcatgaccccaaaggctggtgaccaccgccttctccctttggttttcttcttatacagactgggggagcagggaggcctggtgtggagtaatggtagagattagttctttctaccccttttatgaagctctctgggtaagaattattgtttcacatctgaaagcttgttgcctgcccccctacccctatcttccttattattattatttttagaatagtcaggaatttggtgttgaactttggtcttagtcaaatttgggttgggggtggtggtgaatacaaagtcccatttaaacaatagagtctggtataagagacctaactctctgcttggaaacgtagtagtttattgataaataggaaatcttactaatatataccaattttaaaatcctttagatttgtggcctagcttattttggtggaacttttactgaacacaaatttctttttctgttcaaatgtactaggggctggggggaaagcttgtttaatttctaaaaacaaacattttattgggtcatttagtttatgttgcatttaaagtaaaaccagtgattatttcaaatctgaatgtctctgacatgtgggactcagatgtgatttttactttaaatccagtaatttctcacctttttgggataccaatgccaggcttgtctcctggagactttgaatcttgctacaagagattgtgtctcaggccctcatgcttggttatctgatctgttggtgggtgactccagctcactaatctttgctctagcaataataacagctggcatttattatgacttagtctgtgccaggtgctattctaagatggccttgtcaccattttcctcgtgtttatccatcctcccatgcatgtgtacacctacacatgtactggacttctatccaagccttacacatagcccgtttaatcttcctggttctgctagaaaatcccattacctccgttatatacctgaggaacctgaaacatagggtgaggaggtgacttgcccaagtagaggagctaaggaaaagaaggggaacttcaaatctgggtttgaccccaaacctgcattctccagcatgctgtgttgctgaatgaagtccacttcattctgttcactggctcagcagccagcaagttgacagaaaccaggactttttcagcttccttacatgaagccaagcgtccctctttccagagtcagcagggtatgctgatgtgtgggagctgcttttgtcagctttttacagtggtccttagcttcaggtgctgtctgagctgacatgtggagcttagcaaggggtgctctgttaaaatgcagctctgttttccccctcaaatgtgatcattccctggagagtaagtggggaagcgtcacagtccagtggacattgacctactctagctgctcttaggggttgtcagtaggttgacaggtttgctttgatatcttagccagaaggctggccccctctgcttccctgcaagttatactgagaaatgcttcagaagctagaggtgcaagttggctatacccaaactgagtggtctgcaagtgtcttcccaaccttgaagctgatgagaagggcatctggattgtgcctctccagaattctctgcaaccgccttcccagtcccacttacaacaataaattcactacttaaaaaaaacacaaacaaaaaacaaaacataaaataaagcctcactttttgagaaaattaatcagaagaaaaaaaacctgtaatcctgtcaccccaagatagccatattgctttatacatttatatatccacacatacacaattttaaatgaaatcatgagctgtatatgcccccttcgttttaaaatgctacataaacatctttctgggtcatggcatatactttgagcatgactgcctagtatttctttgggtggatagtccaataatttatttaaataaggcttttaaaaacatttggactgtttttagtttttccctattataacaatgttgtgatgaacattttcggtgattaaatctttgttcatctttattatttccttggcatatatttttagtaaaagaattgctgaattgctgcaaaataagaatacataagacttttttttttgagacagagtctcattctgttgtccaggctggagtgcagtgccacaatcccagctcacagcaacctccacctcccaggttcaagcgatccttccacctcagccttccaagtagctgggattacagacacctgcctccatgcctggctgatttttgtatttttagtagagatggtgtttcaccatattggccaggctggtgttgaacttctgacctcaagtgatccacttgcctcggcctgccaaagcgctggcattacaggcgtgagccaccgtgtccagccaaaaatgtaagacttctgatgtgttttgctgagctgcacacctgccctgccccactcagcctgagaaggtcatgtttcatgataccaaggacatcactgacacccctagaaaatgttaaggtcccctcccttaaggtctcaaagttcttagttctttcactgacctattccttccaccttctagatattcacttttctcttctaaaacacaatgctgactttttctttttttagtacatagtacctatgcatggttcaaaatatttcgaaaagggtacagctgatgtgcttgctcccacctgtgtttcttatctgctctgttttgttctctgcttctcttttctacctgccacaggtcaccatcttttttaatttcttacatattcttccagaaattgtgtatgtgcatataagcaactgtataatttgggccctaccagagagtggagggtgggaggaaggagagaatcaggaaaaataactgttggatactaggcttaatacctggatgatgaaataatgtgtacaaaaaacccccatgacatgagtttacctatatgacaaacctgtacatgtacccttgaacttaaaagttaaaaaaaaaaaaacctataatttgccccctccccaacattttaccccaaggtagaagtctatacacagtgttctctagcttgcctttttaaacataaaatataatgaagaaactttaaaaataatcagaacagagacaacatcttcatctttttttatgttcaaataccctttaggccgagtttggtggctcatactataatcccagcactttgggatgttaaggcaggaagattgtttgaggccaggagttcaagaccagcctgggccacataatgagacccccatctttacaaaaaacaaaattagccagcatggtgtgcttgtagtcccagctactcatgaggttgaggcaggagaatggcttgagcccaggagttcaaggctgcagtgagccatggttgtgccacagccctccagcctgggcaacagagtgaaaccttgtctcaaaataaataaataaataaataaataaataaagatactttaggtgatacattaattatctcatgttttcagtaacaaaatgatcagacctaagaaatttaacattaatataataatgatatcaagtttgcattaaaatttcttactttagctagaaccttgttgaaaaacatttcctcttactttccaaaaacattgtatgtaactgtttttttcttccattccaggatctgtgagatattgaatttggttgttatgtcacatttggtctagaaaagagaagagtactgctaccatttgggggcgaggggggtccttctggatattgttatttttcaagggttcaggcaggttgtcctgttgaatgtcaccccatctgtacttgtctggttgcttcttcacgattggactctgatcagacactttgccaggaagatcacagcagtgatggtctgtattatacttcccactgtatcacataagatgccatgccgccttgtctcactgtttgggatccttagtttgatcacttggttaagggggtgtctgccggctagctcagtgtaaaggcaccctgtttcctttgtatccaataaataatcagtgagatggaagtttgagaccatgtgaatatcctgttcctcaaaagaccttttacccaaatactttagcatgcattaatggtcctttcctatagtattacattgcaaagtgatgattttccaatattacccatatttttttgctagtattttttagtaaagaagagcttcatctctctcccaccttgttagtaacactgtggactcctggattttctttcagttcagtgattaccattcagtgtgttgtcatggacatcactgtgcctattgatgcactaattgtcccaaatctgacgatgggagccctttcaagcttgcttttctgttcttttgagcactcactcactttctggcataataagatattctaggcttatcttgcatttccccagtcctggaatcagatccaaagaatcctggttccttctaatgaggactggtatttataaaccaagatctgggggctgggtgtgcaggtcgctatcagcacttgtcattactttgagccactttaaatgcacagaggcaggaatgctataaattatgagctcttatcgatactttcagtgtaaatcaaacaccataccattagactccataaaataggctctttatttttcgcacagtgagaaacctaattccaaataatatcaatacatttacttatttattgtattctacggtgtatacaagagtctaggaattaccgtactgataatacaacaaacctaccaaagttcaaattttctttttttttcttttttcttttatttttccataagttatatggggtataggtggtatttggttatgtaacttctttagtggtggtttgtgagatcctggtgcaccatacgctgcaccgtatacatagtcttttatccctcgctcccctcccactcttccacccaagtctccaaagtcacattgtatcattcttatgcctttgtgtcctcacagcttagctcccacatatcagtgagaacatgtgatatttgattttccattcctgagccacttcacttagaataatagtctccaatctcatacgggtcactgcaagtgctgttaattcattcctttttatggctgcatagtattccatcgtatatatacaccacagtttctttatccactaattgattgatgggcatttggctttattaaaattgttgaagtgaggttatcctaacagtgcgaagaaaataattcgggtgctgtagacagctagctctttttgttcctacactatatcccagtaaaggtttaaaggagtagtgttttgaaaattacttggacaaattcttatttttaaagtgattttgtttccatgttaatatacgattaggttttcttattgctgtttgtattcaactttagggtatgctttgttcatcactttaaaatttcttgaaaatataaaacatttatgttcaaaatcaaaactatatagagaggaatagaaattttactccctgctactgtccttcccaccctgtttatcctgcccactgtgggaaccatttctagtagctgctagtttattatttctgtgtttctttctacaaaaacaaggatgtatattcgtatgtttttgtttcctactctctcatgtgtatacatgtatacatgtttacttgcgtaccttgctgttttccacttaacaatacatggaaacagcttatagcaatttatcaagatctttcgcactctttcatagggctgcagaattttttccattgtgtggatttatagtagtttattcagccagtctcctatgtatgggcatttaggttgtttgaacattttccggcatattcatgagggtgagtgaataatcttgtgcatttattgtttcatgtttgcagagacgtatatctttgggggtaaattcctagaaggggaattgctgggtcacagcagaagcatatgcaggtttgtcagcaattgccaaatccctctccatggggctgaaccattttgccctttaaccggcaacatagaacagtgcttggctccctacagccttgccaacagaatatgtgatgaagcatttgggcttttgcaagcaggataggtgaggaatggtatcacagtgtagttttaattggcatttctttcattatgagtgaagtggagcatcttttcaaatattctgtgtggacattttatgaattttgcccatttttctattgggttctaattctttttctttttgaaagttgcgtatattccattgtctgaatgtactttgatttatttgccttgtctcctattggtggaaactggggttgttccctgtgttacgctgttaaaaacaatgctgtaatgaataatcttagggaagcctcatttcactcgtgtgcagctgtatttgtaggttaaatttcagaaacgaatttgtttggtccaagggcatatacattagttatgttaatgaatgttgccaaattacactccccttccatgggttgccccagttaaagcccccaccagcagcacacgtgagtgcctattttctcccgactgactgagtgattgccttttggatttttgtcctgataggaaaaacatgtgatctcagtgaaatgttagtttgcactgagcttttttttttttgtacacctaatacattcttttaaggtttgagccccctttttcctggcagaatcacttcttcctggataaggtggtgatgggggagttgaagagaagatagtgtgatggggattgctcctgtctgaccagaaactctgtctctggagaattgcagccgcagactaaagccctcatcaagtgtccctgttcctaaggtccactccaagtgtgtacagggtctgctggcagcactgggccagggccccgggcatgtcctcccaagaattcgtggcagtgagtctttggcgagccaccctccagatgaatttcttagtggagggagagtctgactctggaagaacagtttgtgacttgagggatgttttcatcccttttatttctgctcacccttgtcagttgctctgttctcctctcctgcgcagtctacctgagtgaagtcactctgccctattatttcccatgccctcaggtcccatgggcatgtgattacctctttgctgattgcaaggctgtggagttccctaatcaccttgttctcagcctcttatttccctgctgagaagtggagggagtgatggggttcctcctgctcttgggagatgctccttttctggctgctgagaccttgccctcctaggcatggtgcactttgccgtgggtctgatctgctgactgctggcctccaggaaccatcattatctatgctgggtaggaaaggactgcttctgggttttcacattactttagaatagtcaccagggtcctgaagtctccagcaatgtttgttagccacactatggcagaaaaagcagtggtggtggatctttctcttgattctggcaaatgtagatgcacagataggaatagcggtgactactgactgagaatttactatgggctgagcatgttacttgtattccatttaacctttgcagcaactgaatgaagtaggtgccatcatcatctccatttttacagataaggaagctgcccaaatcctcacagctattgggtgtcaaagcaaaacaaaaacaaacaaacaaacaaaaaaagataaaaatacacaactaatttaactttgaggagtattatgatttggtggggagggcagcaaaatctgccaatctaattatgtaaaaaataaatttcacttattgagcctatgtcatctgaatagatcagcccaggatcaccctatgtggctctggggacctcagcttggattggagagttggacagagctaagtcctgcacagagcaggtggagctgttgatcaataatgccaacgtttagtgagcatttactgcatgccacgtgctgggctgagcactttgcaccgttaactcatattacaattaactcgtattactctcacaacaaccctatgaaaaagaactgttttcccccagtttacatttacacatgagaagactgaggccctggacactaaccatgttgcccaaggttggatgactaacccactagagagccatgattcagacctggctgatctgcttcccgtgaggctggggaaattctgccagacactgggcagcatcctccagacagattctcccttttagtactggagagagggcagccagaattttttgctgtttactgtttggtgaacagtgattcaccaaaatcaaaacagtgattcactggtgaccagtgattttaagaaagcagatttcctttctggctttggtgggcttggtacaaaggcagtctccatgggccgcagagtgcatggctcttgcatgagccaccagactacacttggagatggttgaccacttcagggcatggtggggtctcgagggcaccatgctcagcagccacaccttcagaagcctttccagatgtccctgtagcctcctctacctctgtctgggtttggacttcttattaatactatcaccacagtgtggggacagcctcacctcccacactgtgcctgtggataagacaaacagcataactcttatctcagaaggccaatgccaggatggctgactgagcttgactgacctcttttcgtaaaaataccttgcatttctctttaaatttttcttgatcaatcagcaaaaatttaaaagtatgttctcagtgccacagggagacacagacactgctcttgtggaacatattgtttagctgaggatgcactcacaaatccgtccacaataaatggccaaatacatttcattgtggatggaaatccataaggcagagcccaggtgagtgccacaaacatcatgcaggccatctgtggtctcagtggagcaggagatcagtgtggcctagagtctttctaagggaggtggagcttcaagggtaggagataacttatagtagcagcatcatggagtgaagagtgttctaggtcctgaaagcttttcacagccagcctctgggtcccagatgggaatgtcaaatttgggctgctctcaaagcccacctcatagcagcatagtcaatagtggagcatgactgagtagtgtccacagcttccacccatgaaatagcctcttgggtgggggtggccaatgaaggcatttccatgcagtagctcatccatatcaccagtccatccccatgatggaggtccatgacaagacagttctgagccatcaggagcatttactcaaggagaacggggtgtgtatatcacagtgtttccaaagtacgttgcactgaactttaatccaatgagaataaatgattctctggagaagtacataatatactccctttagatatgtgcagtacacattagtttttaaagggctccaaggtgttctatagttaaagaaacctatttaacttttcaactcattgtttcccaaacttaccatgggatctccctacttttttgcataactcttattaatattcataagaaccatggtctgtgccttaaaaaaaaaacaactttgggaatggtgagatagtatatttctgaaagatttctatggtaaaagcacttaactgctaaaaagctgttgaatttaaaggttccaactcttggaggactgaataacagagttgttcctggcgggttctggaaagctgactacatattcgtgtttccttcctgagttaaaatgttaagttccttgagggcaagcaatgaaatcctaacatcctttgtatcaagcccacagctttctcagcactgactatgtaatagctattcaataatgacttgttaattgactgattgaagatgtttgttaaaggccaaagagttaattagttgatgctggaatccagttctttcaacttccagccagaagcttgttttgtcagcccacaaactctaaatttagggccctccagcttcctacagtttatcaaaactattttaaaaggttaactcttttattaagtagttttccgtaggcccatcattcctgactccccttcacccattatcatgggccttaattgtgatgaggtgggtgaggggacagttgtcggcatgtgtgtgtgagttggggggaacggcccttctttctcagttttatctcactacagcttcttgacccaggaaagcatgtaactgtgatcatgcctgcttcgttctccctgtggcttttactttgggaattccatcctggaagtggggctgaaggcgggcttttcccaaagctgactttcagctgacactcaatttttgagcataataaaaacgtgttaccggccccccaaacttccactgcattattattatgtatgtattggctactgacagtgtacttgggggtttcacagcatcaatagaaaagatggtccttcgtcaataggattacaatgttggccatttgtcataagtatattagcccaggttaatgtggctataatgagcaactgttaatttcttttcctgtacaaatacatcagatttcagatgtattgaaatgtgtcattctatggctggtacttgaacctgcagcttgctggtaagcaggagaaagcgctgggcagaattcaaatgccttgcaggaaagttctttaaacacccactggtctgtgtctgtttctgtgtttatcctttaagcacgggaatcaaaagaaaagcatctttattttgagtgtttcagtctatctctgccatgtattggcagccctctgttctctttaactgcaggagtcactaagtagcattactcatgtaaaaattgattgagtttaaagaaatggaatgagaaggagtcttcattgttctaagtgagtgtcttttggttagcagcaatccattggagtgagatctcattttgattagggacagtgtgtcctattgtataaagctgttttaatggaaaaattattaaaataattctaagccctgaaggcactggaggttctgaaagtgtggagggttgaaaccaaagtggattttattaactctgtttatctggattgtttgtagatccaacctaaaccatggagggtcaatttgcctgaagtacattgttgaatttaatttagttgagaacaagggccaattagaaacgtttctatttggtgttgcttgggcacatatctgcctccacccttccatttgctgagcccctgccatgtgcaagataccttcaacctcacagtcttcataaactctattccctttgtgtctgaaatgctgtctctttaccggccctgccctttacctggttaactatttctcatccttttggtctcagcctggctctcttctttagggaagccttacttgaatcccaagcagatcacattcttcctgtggtgttatcagatgtactttttcttcattgcccttgtcacacctttaagtcaatgatgatttgttttatttctttaatatctgtttcctcttctatgttatatgcttcatgagagcagaggtatgtctattttctttaatatgttttcaagctcttgcacatagcttggcaccaagtaggtactcaaatagttgttgaaagaaggaaaggaagagttggaagctcatcgtgaagactttggcttttcagattgcaataggtacacctttaagaacatccccaaatattctcacctgacattcatgcccttgtgtagtcccctctccttgagtatgggctggacctagtgactcatctctagccagtagaatattgcaaaattataggatgtcacttctgaaattaggttacagagaacgtgacttccagcttgtgtgccctctctcactcccttctttgcctgccctgatggaggccagtggccatgctgtaagttaccctaccagaggcctaggccatgtggcaaggaaccaaaggaaacttctagttgccagccagcgaggagctgaggctctcagcccagtagttcctgaggatctgaatcctgccaacaaccatgtgagtggactgtgaagtggctcctccctccatccaagcttcccgtgaaaccttggcagatcccttgattgcagcctgtgagaaaccttgaggcagaggcactgagcaaaactgtgctcatattcccgacccagagaatctgagatcattaatgctcactattttaagctactaattttgggggtaatttgttataaagccatagataactcatacacagatttttccctgttaggtttttagctacaaatgatgctcatgggaacttaatacaggcaaggtcttgtgctaaacacttaagatgcacactcttatgtattcctcacattaactccatgtaagttccattatgtcaattttacagatgagaaaaatgaggcaaagagagattgaataacttgtctaaggccttggcagagcactgggagtgtgatcctggagtctgcttttacccatcaatctgaaggtagactatgagttggaattgctttgggctctgtcctcacctaaagaccagggctcctgactttatgagcttccaggactcaatgcaagtaagttgtccaactgttcagtatgaagatttgggcagtgcctcagcttggaccctgtctctttaaggagctgaaataagcccctttaggagagatccagctgttgttttatttaggcatgaccctcttaataccctatgaattagcatgcttagtgtggaaacccaggaagaaattctggtcagtcactccacttgtgtccaagaataaaatccaatcaggaacacaaaagatggtggcttttggaataaaatgagcagcatccactgtgattacagcttgttttcaacttctgcaagatgaaattaaatcgagtaattgtttgcacatttaaccacatgactctgatttgtctgaggcagattgtggcattgtgaatatttaaaccagtaataaagtctttaagcttatgttccattttatctcatttatttgtagatcttaaaatgtaatgaacagaagaatgtaagatgtttgggggaagagataaatgttgtgtatgatcactatggttttaggttatgaggttctaagaccttgtgctgtaattttgtatgcattgtgattctgagccctggattctggaatatatgttctttgttagaaatcttggaagaccaagactcttgttgtctgtttttctattctttggtgtgattctatatctcttgcctcagaattgatttttggcaacttcttaagtactgtagggttgcatgataattgcttacctaaatagattaattttgagtgattgccaaataacctggcatatacagacacagattgcaaataagtgttggatatgaaatgtgtcttgagtgtgtgactatttgaaatgttgcttcagatcagactttgtattgcagagatgtgcctgtgtatctagtagcaaaaatccctgacagttcaatagaacttttccagctaaacaagaatcaagttgaggctctcagtaaaagacgagtttacaatttttagaaattataagcttatatattagtcttaatgttgttatgagaaggaatttgaatggaacttggattttatattccaaggctttgctttgcccatggtgttcagctgtcatgattttaatttttttaaagctgtcatgattttggcagctttctgatgttagagttgttttctaacctcagtgagatcacaagtgtgtttgatttggtaagtgtgtttgatttggtagtctcttcaacaacctaaatttggagaaatgtgttcacttatttggcgatcttatatcttccttgtggaggtattttatgaatataaccaaaattgatggccgtgggtgcttgttgattacttctcattcagtcgtgaatcctggactctggtgttatctggcactcccttcctctccagtggcttctatagcgttgttctctcaaggttttctgcacgttctctctgatatctctggctttgtctttttgtctgagtcatattctttctctcaacctttaaatattggtgattctctagggttctgtcctcagacctcttttcaccttactaatctctcctggataatttaattcactaggaatgtttctgctaccacatatatgctcacactccaatacgtgtctccagtccaggttattctcctaggttcaagacacactcgttcctttgcccagcgacctctccacttggatggcccctccaccttgtcaccccacagtcagcatgtgcagacctgagttcctctttgtcctagacctgctccttttcctcttgcttctcattgtggtgagtggcattgccattcatcctgtcacctagactggcaggctgttgctatctaccaccccaccccaccccacccaggcctgtccatttgacctcctcagttgctctcaacccatcttcactggcttcttgtcagtctcttaatttaggcccataccatttcttgccacactatcttttccatattcttaattttttttaaattataatttttaattttttgggtatatagtaggtgtatatgtttgtggggtacatgaaatatgttaatacaggaatgcaatgtttaatcatcacatcacaaaaaattgagtatccatcccttcaagcctttgtttgtttgtttatttatttatttgagacaagatcttgctctgtcactaaggctggagtacagtggcatgatcatggctcactgcagcctcaacctcctgggctcaagtgattctcttgcctcagcccccacaagtagctgggactacgggcctgcaccatcatacttgggtaatttttgtatttttatttaagagatggaattttgccatgtttcccaggctagtcttaaactcctgggatcaagtgatctgccctccttggcctcccaaagtgctgggattacaggcatgagccgccatgcctggccctctcaagcatttatcctttgtgttacaaacaatccagttacattcttttagttatttttttattttttgagatggaatcttgctctgttgcccaggctggagtgcagcggtgtaatcttggcttgctccaacctctgcatcccgagttcaagtgattctcttgcctcagtctccggagtagctgggactacaggtgcacgccactgtgtccagctaatttttctatttttagtagagatggggttttgccatgttggccaagctggtcttaaactcctgaccttgtgatccacccaccttggcctctcaaagtgctgggattacaggcatgagcaaccacgcccggcctcttttagttatttttaaatgtacaattaacttattattggctatagtccccctgctatactatcaaatactaggtcttatttattctatttttttttgcacccagtaaccaccccacctccctcctcccaacacccccccactacccttgccagcctctggcaactatctttcgactctctatctccattagttcaatggttttgatttttagatcccacaaataagtgagaacatgtgatgtttgtctttgttttctgtgcctggcttatttcacttaacataacgatctccagttccatccatgttgttgcaaatgacagaatctcattcttttgtatggctgaataggactccattgtgtatatgtaccacatgttgatggacacttagtttgcttccaaatctaggctattgtgaacagtgctgcaacaaacatgggagtgtagaatctctttaaaatgctgatttcctttcttttgggtatatacccagtagtggagcacatcatctttaagccaccttccatatggacctggctttgagctccatatttctgaaacctaaatctgatcttattacattcctgcttaacatgcttcagtgatgactcctcgttgtcctcaggactaattccaaatttttactgtggcccatgaagcccctgaatgatttggctcctgctcatctcttcagcctcatccttttccactccctgaatggtaccgaaactatcagcacttgttgaagctagaatgaacttgctgttctcagtgaagccctccctgttccttctagtgaatttttggttttgtatttggctctttgttcatctctctgagatactattcagcatgctacattctgacacatggacatgtttctccccatccctttctttgcagactctcttaaccttttaagggcattatatctgaaataagagcaattagtgacaatagcttacatttattaagcccctgcttaatatgctagacaccattctaagtgctttgcatttaatactcacagtagctccatgtcatcaataccactataatcctcatttttttcagataaggaaaacaacgcacaggcaagataacttgccctgggtcatacagatgagaagtggcggagctggggttccaagcctggcagtctgaccacgaacctgccccttagccagtgcacgatccagctgcccagtgtctgtggcttgcaggaattagtctgaccttggaaacctttctcacctcggagtgtgagccatggccttgtctgtatccagctgcagtgaaactttgggctgaatgcctgaatggatggaagctccaggctctggctgctgccagaggaaaagcagatgtggttcctgcctttggggtctttctggatcctggctgtcaaggagaaatgtgcatgctagaaacaatgggaaattctatcagtgaaaaataaaagaaaataaagtggctgtaagggtgtggggtttgcccagatgtggcctcctggtggcctccagaggctaagcacagggggccatcaggaccttcccacttcctctcgcttaaggctttaactgccagcaggtgcaggcacaggttgggcgttaaccccttcagcatagtcagagggtcatggcttgagtcctcatttggccttttatctggggctctggatgagtctccttgttttcctgagcttcagtttcttcatctggtgatgttaacactggcttcatggggagtttgaggatcacaagagataatgggatgtgaaagtgctttgtgagtaatcaaatgctacagaaatgggggtagtttttattattagatcatagagagggttgctggaagatacttctgatttatctgagtttcagttattgtctctctatctcgttagtaccagtaagtgagacttggctgcattttgctgtttctaggttaggatgaaattttcttaaaaggcagctctgcttttcataaagcctcattagagcccagagacgggcagaacaaaaatgcaggccctggagcacactgtgacttgcagcctaagctttccaggagactcttatttcaatcacagtggaatgccagtgatcttacccttgtctctcccgcccttaagtccgtggttatgggagttttattagcaacactgacagcatttcaaggggctgcccccaaaagctgcttcattaatgaagacatttctggaagtatcctttctcactgactgtgtgttcagctggttccccatggtttttcctccatttgatgtgagcatacacaatacccagctgccagtgtcttggatgcagatggtttaaaagaaactagaaactctgtagctgcagtctctttaagatctgcttgagcatcacatacccttaaacagattttctacccagggaggtaaagtttcgtggatctcccaagacacggactgattaattattccatttatttaacaaaaatgtattgagcactaatatgtgccaggcacatttatagatcctggagagacagacttgagcaagacggaagaggtccccgctctcctgggttttatattctaatagggccacagacaacaaaccaaccacgtacatatattagaatttctgatagagctacgtccagagaggaagacctgacagggagatgtgatacatgtgatatgcctccttgggggcacaaaagttaaataagagcagccaggaaggccttgtagaaagttgagtggaggcagctggtttaagatctgggaagaggcattctggttgagggagcagcaacgcagaggcccagaggtgggaatgaatatggtgtgtttgaggaataaaagaaggatgtgtggagtacattcaatgggcagcagtgtggtagaattgatatgtagagctttgtagatcatacagggccatgtagatcagtgtaaggaattggattctatttgatgttagagatcaccttctctactcatcaagtttaacaagtagaaactcagagtgaatttgcttggagagtctttgcaacttcatgttacttgcctctctgctagagacagtcaccattgtcctctctgtctgtccaatattcatcctggagcctggcctgcatctgctggctgctggaccagcttacttcaatgtctcctgtagggttggggcagaggaggagggcagggagcggctgctgagctttactccttggctcttctgtgttccctaagtgcattaaacaggctggtccttatcccgtaccttgacctggaagagtctccctggaggcgtcatatcctaagggcttactcccctgcagtgaagattgttaagcatacaggggcggagattttcagaggagtcctggtcagtagactcctcaccttgcagatgtagaagccagatctcccagacttcttgagccattgctcattctccagcacaggcctacaccactctgaccatcccactgcctgattcatatttgtcatattttccttaaatgtacctgctcagatgctttaaaaactaattcaattcagtgaattgaatccacacctcttagcttggatttcaaggccctttaccatttagtcctacttactgccccatccttctcgctcatacttctcctacacagattctttcccatactgtacatgtttacccacaatgtgtaaatgccactatcctgtctgcatctgtacatgccaagccccttctcctagcataccttttccattatcctagcactccaggaacaccttcaatttccagttccaaacctgcccctctgggcagccttccccagttgctttaattcatgagtatctttcatatacctctgaatggctctagtgcttacagtctttgtctgtaatggcctcaccatgtagttattttacctttttatctcctccagtgtaccgtcagctcctggagcgcagggcacttggtttattgatggtgtcgagaaaagcctcagagatggtgagaatctgtgaacaagctggaaaccacatgcacctccttcaggtcagggtgggagtatattccccatgaaatagtccggaaagatggagtagcattgcttaaatttcttggtgttccggtcagctcttcagatagtttccaaaagaagtccctggctgaaataattccccgcaactccagctgtgagcaatgaattaaaaaaaaaaaaaagcctttcattagcctctctctgtttgtagaaggcaaggacattctgctcttggaaccacctcttcattgatgggaaagttcccctaaggcttggagttgggagttgcctatttttgtttgagggggaaggtcagctctggagataggtggacctggtcacagggactgctttgttgcttctggcattgatttgataaatgttctttgtctcagacttgaggatgcttcccctgctcttgaattcaataataggtcttgtttttagctcgcagaagactacacgacacgtacatcctcacccactcagtttgagcaagagcaggccctgtctggttcaacatgtagtcaccaacacactcactcgatatagggcattggacttgggctgccagcctcactcactggaccacctgaccacatggaattgtgtgtgcaccttcactgggaaatggtaagatacagacagactttccttcttgtgtatattctctgtttccctgttggtaaaatcattccaacttagcacatccaaattggtggcccatctttatgggcttagaagatgataaaaccaccccagaacagttgcttctagtatttattttgacatgagtatttctatagtattttattttagctgagggtctaatctgtgtattgtcatttgatgctcaagtgcttcccttttgcccacagagcacatgtgttttctcaaagggacaatgtgatacacccaagaatgttagatgttttcttgcctttattggtaaaagctaaaaaaaacgaacaaacaagaaatggaacccttactctaggagaaatttcgttggagcaaaatgggataattgaacagtaatgtttcttaaatttagtagcacatgagtttttaccatatcttaccataaaagcttgagtgaaggtcaagattcactgactttctcaggaagagtgaattattttgcaaagttaaggcatctaggggctaaagatgttgccccaggcagtatttaatactttctgtattttaaaaatttgtttctcttattacaaaaacaatagtaacatatgtttattgtagaaaatttagaaaatagtgtcaactcttggctttttcttttgttttgttttgtttctaagacccttcctagctggtcaagagaacctgattatggacccaggtttggaaatgatgagcaaagcttgtgatgtcttcaggagcatttgctggccagtcctatgtcttaaacatatgtcacaagaaagtgacactggtgtctatttatgtgggttcttcaccaggtcgtctctcccatagcctgttccttctgaaatgtgcttttctgacttaccaagaagagtccagcctaacctagaacgagagcttactggaatgatgatgttgtcgtccataaagaaaccacctctctttaaaagacacctcaacattcctttaagtccctgcttgtatttcctagcagtgcactggctgccactgttttctttatttttaataaccacaaaacagaattgagtcatttctgtgggttttctcattttgtatcctttggtttatcccccatatgcagctcccactttgtttaaaactgaaggagagttaccttgttcgaggaacaaattccccttttttcccctctgggatgattagacaagccaatatgttcttgttgaaataaaaggaatgtagtaattctgtgaaggtaggctcagtgctttttaatctttgcatctccaatgtctttcacgctatttggcacatagttggtactcaaacaaggctagttgaattactgatttaaaaccccaacacatccttattagcttatctcattgaaagaggactgccacactgcatacctccaggggcatctttgcacaagtactgtcctgcttgtgcagcctaatgtagcagccttgtctagaaggaatagtcaatccagagtatgagatttgaaaggctccatgattcttggcgtggtgaaaacaaaaatctcgaaaagtgacgttgagtctgaaagctgctcatgctctcccactgccccacactgatattattcatcagtctcctcaagcctaggaatattgtattctgctcagactcatcctgcatggatagactttatctaaattctaatccatactggcactgcttccactttatatcattctgatccaacccattcgtgtctattttctctttgatcttcctctgaaaaatttataaggacctctgcaggtatctgtgtatgtgtgggtttctgctcaaaaccagccatatgtgaaactccttcttcttgatagtgaagcctcatcttagctagtgatttatctatctgatgagttgctttcaaatttcaatttattctctactgaatatcaagctaaactgagagccccagaccattaagtaggataactattggaaaacatgagttggccaaacaacttgcagacttacttcagatttactgaatagtttcttgaaacaaaggttaatatacccactagcagaggtatagtagttggtagtgtgtattaacaatgaatttcttctgtaggtgtcaagctatcttgtattgaagtagtctgtttggtatcatgattatagtttcatagataaaatttatataaatttcccattggttctaggtgactagttattgtttcagtctaccacggtatccattacagacttctgtcatagtccctatagacaatcattttactggttatgggttctttccttcatcattcattattacctccttgaggacaaagactttctcctttcatatacattcccagtggtgataattgtgacagaacataatatcgtttagtaagtgttcattgactgaataaatacatcaaaaattctaattaagctgatgggtcaaaaacacccttgggtcgttggatataaatatacaatctgggatcaggaattaccaagattctttagcatttaatatagttagagaattagaagttataaagggcacatttcttctcagtttgccaagaggagagaagaaatcattgtatttataagtattaaaagtatgtacaaacagctccatgaattatgacacatgagttattggttatgttagttttgtaataatacagaatcctgtttctcctcctgtccaaaggaaagctgtgagcactggatcgagcaggaatctcctgagaaataggagaagcaactgaggggcggtgataattaaacactgtggacagctacagaagtttctcagattcaggctgtggaccctcatatgagcagtctcacttattaaattggactgggaaaagaaattagtctctgaattcttttcctcctcctcctgctttttcttctttcttccttctcctccttttttcttcttcctcctccattttagagatagggtcttactctgttgcccaagctggagtgcagtggtgtgatcatagctcactgtacccttggatccttgggctcaagtgatccttctgcttcacctcccgtgtagctaggtgtgcaccactacacccagctaatttttttttatttctactttttgcagaggtggagttttgttatgttgcctaggctggtctagaacttttgggctcaagcgatcctcccacctcgacctctcaaagtgctgggattacaggtgtgagccactgtgcccaggaagtctctgaatcttaagccatgaagaaagctggtggctgacaggaaggaatgattccattttaagagaagatcctctaagtgtgtcagatccccagtgctgcaggtattagagacaagaagcaacctgttactatagaccacatcagcacagattcccatggtaaatggttgctattattccaggccatctcagggctatgactttgactggctgctgtctctttagaattgtctttatttaggctccaagaagcagctattcttctcatataccctgttaggccagcctgggccctgtctcctaggagacatgctcgatattctgagagaaactatcttagtttgattcaggcagcctggtgcctacagtgtgccctggaaacaaaaccgtctgtaaagaaggatctttccttcttgatgagttactgtgggactccgggcaagtccctccaccttttctggcctcagataactttattgtccttaagataaggtggtatttgtgaatagacccagatccatcaaggaaacatgctcatgaagatgaaagtgaagtaatattatcccaatgataaatgggtgcattctcttgtgtaaggtacaaagtcttgttacagcctcaaaatgtggcaccatttctccacagttcctagctaagtgaactgataacccaaaggtttgagaattgaacatgtatctggagaaacttacccattaagacaatggaggtcttatttggtgatacatttactttggaaaagagagaccattttctcatgtattattttttcttggtaaaaaacaatggaacagatagatagatatatgcttcatattcaaatgttccaaattatgcatgacagctttccaaaaagctggcatctaaaagcaactccccttttgcatatatatgatttgacagcattcttggtcttggattgtataagagctgtcatttattgctgtgattcaacaattgtgattaattgttcaaggggtttcattgtcctttgccaaaacaaaattaagggaaaacattctcatcatgccaatcatgtaactttaatgtttatttatccttccatagaggaatcaatatctatttttgaatgagaatacaaatcactgtgagcctctctcaaacattgctggaataaataattttgaattcttctaggggactcacttcattaccttagcaagttatatctcattgttcccccctcccctccagcctcagcagattttgagggacttgtatggatttataggaatatggcctttcctttagggtcttttggttatgtaaaagagattttaaatgctctttcatgtgaatgttattgagccaccttaagcaggagctcagtgatcctccgaatgtgtttcccattcttctaggtattttgggggagatccttgcagttgacttataacccaccctgtggttgccagagttggtgtaggggtggctgtcctcttaagtctggctttctgtctgttgttgagctcattaatacccatctaggcccaggttttgctagttagatgagccaccttaagttatatgagctgggctacactaacagagacaacaattctattttatcctgtagagatttatcttcactattctcaccaatgctattcttgaatacaatatatggactctgaaatcttacttttcttttttttttcctgatcccaagtagtatccgtcttttattcttgatagtgacatccttgtacatcataatgtttgtccttagggagcatggcatgcatttgcatttatccatgcacaaacagctaaatttagtttggagaagtgaaacccagggaataaggggactccactacaatcacattagacctctaagaccttgatttttcatttacttttaattttctgcaccccctgtacccccacagaacagggcaataagaaacacacaaggacaccttgatcatgtctcgctctaccccttaaattgcatcactattgtggcatagatacctatggggcagtggtaatatgtatctcagcaatgctaattggaactgtccgtggtgctgataggcttattaagaaaactattcttgaacaagagtgcagccttggatggaatgaaaccttttgctccctgaaattagcgctctagattcccgtggctgggctttgccatactgaatgaaatagaaaattgcggacaattgtttcactagattgagccaaaataatggttttagctttcagtgccttgatattttgggcccaagttttcttggtcttagacattggaagaatttcttactactgggctgtttttggtagataaagctcgtgttttcattttttctttcctgtagctacccaagagtatcacagagagcacacagggaattgacaattatttttaatgagaggtgtatatgaagcagcttcttactctgaatttcctgcactgctttttagtggaatcagggagtttgagatgtacttctggtaccattagcattgacagcgaatttcataatcactttctggaaggaccaagtgggctctggtttttagttttatttcagaagcgtgccttattttttctaagcaaacctactagttgtgacatttggagaaaacacagctctctaatatttgcctttggtttgaatgaggtgaagaacatgataaagtggaaaaagacttaaaagtcaagtaacattcatcttctctttttctaaaactcagattcatggacttgaaggtgtcctggattcttagggtgctagtgccctagaaaattcttaggaaacaagagagtgcttttttctccacccaggtagctctgccgctttgatactagcaccaggaccaaaagcgatattggatttaatgtatatttcttgagaatttacatctgggccctcatagagctgatagagcagtggaggaaacagacataggatagataactgcccatgtgccaaggatgccacataagcaaaagggaaactatagcttttgcatttgaaatgcaagtaataaaaatacaagtaccattgtagtcataactatgctttgggatttgtttttgttgtttattttctcacaagaattattacatgaggtattagatgagacatgtcacctatgcacattacaatctcaatttttaggatgtctgttagacacattcaaattaaaaagatgagttctttcaaaactactatgttataaaccttgaatcagattcactttttttcttttaccaggtggcagtaggtaatagtcaatgcaaatggggaaaaagataactaaataatttgggattcagtaagccccgccctttcaaaatgacggcttcataatgacttggcaaaacactccattttcatattttcttagtatgtacagcaacaagccagcagaattggtataaaaatacatttcattggcaaaaaagctcatctaatcatatcattttgatacaaaacacacggcatgtgatggtgaagttatataccacgaatgtaaatagttaaattttggcttgttttacaaaacatactttcaaggttttctacatggttagtggtctaaagtatgtagttgttatacagattgaacatcccaaatccaaaatctgaaacactggaaaatccaaaactttttggccatcaacctgatgctcaaaggaaatgctcattggggcattttggattttcaaatttgagatgtttaaccaaggtcagtatataatgcatgtattgcaaaatatggaaaaaatccaaaatctaaaacactactggtcccaagcattttagataagggaaactcaacctttagggtctaaaattaccctaatttgtagaactcaaaaatatacatgcttacttactgagctaaaacgttacaggactggctgaaggatacaaatgtaaatgggtgaagcaaatcaatggattctgctggcagcatcttatacaagccagaattagtgtgctgcaataggattaagatttcaagtggaggcataaaatgtatgtgcaggaccaaacacaatctgaatgggctaaatccattttttatttctacatagatcaagggaatgagatttaccaagatgttgcttgttaaatattcaaatgagagctgggtttacgtggtgttgcagggaaagcacattagctggattagtgcagatctttcatattactttgaggtagatttcaagagtctgtttatgcttaatgtaattcttctgttggtgtttattgtcactaaaaaaagaagaaaaggaagtgacaggtgtcctgcaaaattgaatacattgtaaatagcactgtgattgcattgagttcatccctgctaaggctgaaacgtgagcttggggcaacattgggagaaactgtgtattgtgacagtcactttgaaaaacattctgcgttgtgcaggagtgtttgggggtaagcagagatggaatgatcaagcatggctcctggctgccgggagcatggagtataataagaatggcattacctaagaaggggaaaactgttctgttttagactaaggatcaaggagggagaggtgatctaccctgtggcctgtggcttacctgaaaagtttgagtcctgggtagggtgggtctgttcctagactgggccaggtgcggggattatcagtggcttcagagcaactgaactgctacactgagagagactgaggagctttgagcaggagaatgccatgattgctcttgccttggtgaaatttgcctggcatgggtgggcagggaagatgagctgtggaggagtttggaagagggaacactggtcgggagggtattttaatagtttgggtgagagaggtggagcagccacagtgagaatggatgggatgacacggatgcagcatggagatagaattggcagcatctagcagctttcagatgcagagggctagtgaggggagagagcctatgacttcaagcccaggtaataggagagataatggtgccattatcaggaaaaaagagggagaacagttttgaaagaagctgaatattgttgtgaagttcggagctaaggactgtctacataattttcagggcctggagaaaagtaaaatatgaggcctcttgttaaaaaattactaagaatttcaagatggcaatagcagagcatggcccttctaagcatgggccctatgtgaatgcgcaggtcacacacccatgaagtcagccctgattgagctggaggtgctgagatgcatgtacaccccacacctttcctggggagatgcacctgcccccatttttggaatgctcaagtgaaaactcagagcagatttgcatgcactggtgcaggatgccacagagtggtgaccagggctgaaaaggacaagaatcacagcagtctttgagtggaactgaacccactctatcccagtgggttaacacctatcattaccaaaggtgataaattccctagaacaggtgtggagacacaagtcctctgatggttgtcatcaattgcaatttgagtgaaaactattaaagttgagaagaaaggtcctcaatcttcttgcccttccccacctcaacatctcactcccccaaggctatagcttgaagattccctgggcttttttgcattgaggaaagaagatcctgccctttttgggaggtatctaccatgtgtgtttggacacactcttctatagagtttttttttatgaatgccaccttgtttaattttaaaaaattatttcatttgtttcttatttaccttttattttgtttcctttctttctttttctttctttctttttttttttttttttttttttttttttttgagacagcatctcactttgttgcccaggccagagtgcagtggctatgatcatagctcactacagcctgggctcaagtgatcctcctacctcagcctccttagtagctgggactacaggcatctgccactacacctggctattttattttattttatttttcatagagatggggttccactgtgatacctagactgatctggaactcctgggctcaagccatcctcctacttcggcctccgtaagtacagggattacaggtatgagccactgtgccaggctccttgtttaatcttagacatgggttttgcctcattttacagataaggaaactgggacttagagaggcaagaggctctaaaatttgacagtatctacttggcagagcccatctctgtgatgctgcctctctttgctggccatggaaacacagacaatcagaactgcttaagactgaaaaaacacagttgtagcagagctaatgttaaaactactttctgaggaaactaactggttattttatttaggctgagaggagagaggtggggtagagcagaggatgtttttgagtcaaagttattgtgtaggtggtacatgttcctgacacatggtccaggattgcctgtgtctggtcaaggagactatctctctttttgttgcactgggcagaaggtattgggcccttgggtcagttgagaagaaatcattttctactttgcgattgtgaccagccagcaggctggaaagagtgccagggcacctggtcctgcaactgtcctgggggctgaagccaagcatctccttcctggcttcttagcagttctgatgccttgaagcagggcctgagggtagggagatcactggaagattgtggaagagaagtgacacctgaacgaagagtgctgtctcacttccctggcaccccactgacaactccgtggaaatcaggtgtcaggccagattcctactgaagggcagaccttcttctctcaggcagggcttttctgatagggccctgccccacgggaggaggaaagttgggagggcacagaaagtggagcaggtgccaagtgcaggatgtctctgtacaaagtgtctgctaactctgagaaagatgaaacaacggagaacctgatgtttggagtttgaaatcatcattgaattaattctgaatgaatgattcaaattgattgatggggaaaaatgtctttgatatgctgctgtttgcaaatgcaagttcaaggaaattttactgtaaagttaaaaaaatctgattatttgtcactcatacattcttacctgtatttgaattccatttagtggctatacctaatgaaaagaaatcattgagtcctggccgctgtagcccaggcacacagggagtcaggtggcatctgtaggtgtttggggatctctggggttgcacttcacagtagaattctgtccagtcctccctagtctaagagccccaaagaaaccaccaggtttctaatcagatgatgtttggtagaaggaggatggaccctaacttgctctcagattgtgtgccctctctagtacaaacatgaggtgaggtgtggttcttactgagataacagcgagtgggtatgtatttaattttaattaaaaaaattttttttgagatgaagtcttgttcttgtcacccaggctggagtgcaatggcacgatcttggctcactgcaacctctgcctctagggttcaagcgattctcctgctttagcctcctgagtagctgggattacaggtgcctgccaccaagcccggctaatttttgtatttttagtagagatggggtttcaccatggtggccagtctggtctcgaactgctgacctcaggcaatctgtccaccttggcctcccaaagtgctgggattacaggcatgaaccactgtgcctggctgtatttattttttaataccaatgcttaatgcctatttgatgttagagactgaatggtaatattatggaaagccaggcatcaagcccctgggcttttgaatatagccggattatatcacctacctcgaggttgctgatgtttttggctggctttatagaggtggattaaatttatttagggattttcttgcaggcatagattgaatcctagtcatttctcttataggtatggtgataggtttacagatgcctgaacaggtgagtagggatggtttagggaggcgttccccacttctggctctcagacccctgggagaggtggtaggtatggtggtggtgtgggtcatatattgggggggggaatgatttcaagttggtaaatccatgtgtttgccaagctttgctttttacttgtgtgtgattgagtgtaatataataccgatttatttcaaaacacttctgatttgccagtagctttttgtcacagtgtacctattttaattaagatttttctagatatttgagaaagtctcctcagacagaaacagaactagtagaggaccactggtttggggaacagctacatccctgtgactaggtcatggtctcctctgtgtattcaggggcattcgttatgtagcacacacgacagtcctttagtgtggacactcttctcctctgctggtgaagggctttgtcagctgttgccctccttttctccacgttaggcaagaaggagcaataatttatattaggaaacaatgaaaaacattaggctgacctgttgttcaaaacagacatttctgcttatgagaatctacttataagaattatctccatatctgtacacccatattcatagcagcattaacaacaacagccaagaagtggaaacaatccaagagtgcactgatggattaatgggtaaagaaaatgtggtgtatacatacaagtggaatccttttcagctttaaaggcaaggacattctatcacatgttacaacatggatggaagttgaagacataaagctaaatgaaataatccagtcacaaaaagacaactacagtataattccactttatgcagtatctaaagtagtcaaacgcatagaaacagaaagtaggatggtcgttgccaagagctgcagggaagggaaatggggtatagtttaatgagtatagggtttcagttttgcaagatgaaaaatttctggtgattggttgcacaacaatgtgaatatacttaacagtagtgaactgtaaacttaaaaatttacaatggtaaattttttgttctgttttaaaaatcacaataaaaagaatcatcgcgtttctagtttctaagccatgttgacttgtgcccgtcttgtcttttccatggtgcgggcaccttcccaattttctcatactgtgcatctcacataccttcctcctatgggaattcctcagaatccaggttagacttgttctgggatctctcacctgtgggatcctgctgagaccaaagggaagactgcctttgcctctgggccactgctgtggtgggtgtctactcttcctgtctcttagcatctataatctgtttcttcctggcccaacagctctctggagatccaaactctgtcattttctgcagctgcattgattagttgcatcattaggtttggtttaattgcagtgactctgctgttaacgatttttacaaggtacagcaggaaaaaagtctttgggtgcttctgtctccccaaaagataaaatgtaattatttttccatatcatttgaatttttattgttaataaatgcctggcactgttttttggtgtgacatttaagtccaaagggatattgtggagcctgcatatatataatttaatgtagagcatagaattttagtgctggaagggatttctgagagctttaatttcaacttcctttttttataggggaggaatttggggccctgattaggaaagtgtttaatggcaaagctggaatcagtcttaggtcacagtttgtattttgtgctctatttcttgatgcacccccttggaatttagaaaactatatctagttccagggatctgaataccattcattttagagcataatatatctattagcttgaagtgattgtatgtccagtctgctagcagtgagaagtggctataccgtttataaattcttcagaccatgtctgaagtcctatgtcagttgccttctctttaccccagataagtgcttctgtgccaaagtcaacttctgaacttaatgcttccaaggagctggctattagaggattgctggattaaatcattttgaaaatggaagagttcttctataacatgacaaaaatcatccttgaattaacctttcttgggaaataatgtttgcattcaactttgactccctcttccctttcctcatttacacttgtatgatactcttcagggaccttgtacattacttcttgtgagattgtaagcttcccaagcctccctgttgcctctgagtgcccagcacatggaagggagttttaaaattttttttctcttctcaatctggctgtactgaatttaagtagaccattcatagggttgaaggaaaagtatgatcacaaataaaatgcagcttcctaatgcaatgtgaatagcattttgtaaccagttagaattagccacacccagtttcatggggaggtgaaatttggtctcagttctgaagaatgggcagagaatttgtgaagataattatagtagaggaaaaatagcatacccaggaagaaggaaatatagagaagggggaggggaggagaaaacgcaatgtctagggtggaggtgggcagtggactttccttttggagtgtttacctggctcatgtgagccctgatgctctgcctcgttctccaccatttgtagtagtgggctcctccatggccattctgtctggaagcatcctgccagatacctacagttgattgagctagggacaagcccctaacccaagatcagagcctctttcctgggtatttggactaggagctgggagaggaacttaggtagctgggtttgtgtcatgtgagcttgggagctgggaggtggacaacctggtatctgccaggaggctgaacaaggggaagagaatggtcagcagagggtgattttccagtccttagggccttgcctggttgtagggcctggctatagccctgcgtgcacactcatgtcaatattcttgtggctgcagcatagattctccgcaggtccccaatctcctctggggagaagtgaagatggctctattacttgcttctaagagtgttaagaataaagggagtctcaggaagcagagtgagtccggctgtatctcaggagcttgttgctgaggtttggttttgatctccttggaggccaggtctagtggcttgcttggtcctagtgtgcctgggtcagtatgttgtctctgctgtgacttagcacatctggccattctgagttcagcacctgagagaggggatcattggttggaagcttatgtatttatctggtaaaccttggacacctacactgcattctgcacccaaccctattgtgacaccaggcagagcctatatgatgcatgctcaggcacttgagagggtgggagtggaggagccagggtgctccagggagcagaaagacatcacagggaaggtgatgtagggttggatgtaggcaactgcctggtggacagggggagcatctaggcagaggtagaaggatgtgtcaggtggggaagagcatgacacaggggatgcagggagaagtccagagcagattgcatttgagagagaaagggaggtgtggttgccctcacaggtggaagctaggtcacaaagtgccttgggagcctggctgaggctcgctcttcatgggtaggatgactgtacatctcactgtgtcacgctttatgcctgtttatgcctgttatcctggtacaatgatgaacggtgtccctctttcactctcaaaagtgcccaggtttaataagaaatatctttgtcctacttttagatgatgggacctactgaaggattttaaacaacgaagggacagggtgagatttcaagttagggagatgattcaggaggcaggggagaggatagagggacaggagcatgcctggaggccagcttagagagaaaggcctgagcaaagcagtggtaatacaacggggtaagatagtgctcatgtgaaagctagcaaggaggtacagaccacagccgttggtgaacccatggctgtctggagaggggctagtgaggatagctgaataagggcaggctttggcaggggtgcagttgaagtttgttttaggtctatggtttggggtcatggggaagccggacaaggagtcaagtgtggacctgaaagtagtggtctggggcccaggagagaagactggcctgggacagccatctgcaagtcattcggttgtgggtgagaactggatccatcagtgtggatgctactgttcagggggagtggtgtcacagaagaagagaaaatgaaagactaagcctttgtttagggatacaagtgtttaaggaaaaggcaaggagaaatgagtgcacacaaaggacactgagaaggaccaaagaaagagggaggaggagacctaagggcatggcaggaatagctgttaccatgaattggaggtctgctatgattcacatactatgctgagaactccaggtccctcactttgtaaatctgcaacagtcttgcaggtgggtggaattagccatgacttaggggctccgagtttaaataacatgtccaagtttagctgtccagccaaagtggcagatctgtgttttctttttccccaaagcccatgttcttttccaccccatgggaatggtggtggtagcagagatggaggctccagagtccagaaaacctcctcctttaggggacctcagtaacttgggcagatgtcaaattggaggaacttgagcattacaggtgccaatgagagggaggcccactgggctcatttctctgttggccccactgagcaggtcacatgacagggacctggacaagaaggctgtttaaaatggaacatgaaaaacaatgccaggaatttaattgcaccgtgaattgtggccagaaaaggaacctagcaacaaactcattttctgttgggcacaaggcacagaggatctactataattatttctgttgttttccttgttggcacatgcctccctgtttaatatttccttccttgagtgcacatggtggatcagtttttatctaaggtagtggtgttagaattgtttagctacattgtaaagagtttgtgggatcctcggttagtgtgagtgtgggcacacacctgaatctgacatttatggagcacctactctgtgtgcaaggtagtgggcttcagtgttgtacacgcactatcttatttaattcttggcacaaccatgtgagttaggtaatatcattgtcatttcaccagtgcagaaacaatactaaaggaagttagcaatttgtacaagatcccatggctgataaatggcaaattggagatttgaacccaattctccctggccttcccagttactctctacatcttctctgggctggtgttttatccaagtcagagcctccttgcctgcatcttccccccgctcccccgtccccgaactatgattgttcttgaagactcgtaagggctagcatgactgtttaaaaagtaactggttgaatgacccaaaacatttcaaacaacccatatagaggccttagtctgcagctggactagctgaggtcttgggattagcgttagctgaagtcccaggaggaatggatcaagatctgccagaatgtcatcagtaagtgaacactccaggcctgtcactgacagactttgttctttttgcctctttagaagtggaaggaggttgtttctgagactcaagaaattgtgatgctatcaaacaccctgtggcctttaggggtggctctgggaccatttattcttgcaggggacatgctttctggctctgttgggggttctgcacctgcctagttgtgagtaggtaactgctcatcctcagagagctggagtgagtgtccttttaaaagccaatgtcttactacatagacagaaacattccctttgtttgagatctcttgcttatggattttcttttgttaccagagtgggtctgtgctcttttgctaatgaattacccaggagtcaatggcccatgctcaatggattggtgttgccatccgtgcagcataagacacagctgccagccttgtgtgactgggacccaagggtcagagcctccaaagtgattacaaagctctgccatcagccacttttccattcccttcctacatgccagggagccctgcaaatacacatttgctcatttgcctgtggtgagcagtggtttcagcctggcgggtggctaagatggctgatttgatttatcttactaaatagtatgatttgataaaagttggaatcatagacttaaagctgaaaggaaccttggtccagtcccaaaggagaacaccaaggctggagaaaggtggtgatttccttggctaggtcttgaggagactctgaggtgacagctgaggcagtggccctctgcctcataccctggtgatttttctctgctaccacttcagatgtctccatggcaaatgcttccaaggctggtcctattgcctgagaaaattggaaaagaagtttataaagagattggagaaacctcatcagttttccagtggctgttggtgagtttcttctcagccactctgatgttgaacgtctgattgtgactcacctatttctatccagaatcacaggaagagttgtgacggatgttcaatcacctgcagacaagtgaacgagcattagttgtcattatgagaaaactcctttactcttcaggttattaaagaactattactgccctccaacagtcatgtaataagtgaagcctcctgaagctgaatggcagcaataagtgcctcatttgcacctaaggatttgcttgctctctcagcaggatctgggtcaatagacattattttcataagacattcatctttctttactcatattagacaggcttattttttctggaacttgcttttgaagcagtaggctttggggaaaaaataaaactggcagattataagaataaaagcttaaatcaaatttagatataaaaaataaaatataacttccagggaaccaaatcacgacacaatttccatttatatcaacacttcaccataatgtggtttagactcaaaatttgattctgagttctgtaagatgattgctcgtagcaaaggtacagttatacccactggatggtgcttaagttggagagatcattttaaaaagatcgtgaacagcaagtggcaggggttaacccttgacataatcagatttcacttatgagagtttgttgtgtaatcattcctgtagctcttggctttgctctttaatgaacatccctccaaagctaactgtacatactcttccctaccattacattcttgggccatgcaaacttatttcttccttccctttctgtcttcttcctttgtctttgtcttttctctttccttcctttcttctctattttctaggagcttttctcaagtttatctttcaactctctattaacttttccatgtctgtgaatatacacaaatacataaatgtaactttccaggccttttttcttttctttccagatgttcttttattttgtctataattactatttcatggttactatcatttcttatctctctaaagatattcatggtaatcattttaaagatttttccccctccctgcagagtctttttttctccaggctttttactttcttttcccctctgttttgatctccattttcccgtgaaaggctttcctccaatctctgataatattcagttgttgttcatctgtaagagggactacaaagctgtttggacgctttgatgtgtgggtggggctagttgacactgagcttcactgtagggtgatctggctgggctgtttgattaagaatcagtgttggtatcttcaggtctttcctcttaggcttctcagacttcagagaagatgcttatcatctgccacctgtagagtgaatggccagctgccatttttactgggagccagcgaagatgagagggttgtgtttgtgtgtggtggggtgtgtgtcttggcatctccctttgtttaatactcctactttaaatgaggtaccccagccttaaacctatgccctcaattaacagaccctgtgaggtaccagttattaaacctcctgtattttgccatggtagagaaggagcaggcagctctgttgtgcagagtggcagaggaagtctaggggcctgactgcttgttgatcacaattgcaatcaattctttttactttagccccctcaccccctacctctggaggaatctattaataatagcatgagcttttcagccttttgggacttatagtgttaaatggattggtccttagctctccctgtgctagtttacactttggtgtcctcaggtcagctgagactttaatgagtgaggaagcctagggcaagagaagggaagtggcttgtctgtccttatagaactagttagggcagaagctggcatagaaactgggtcttttgactcttcatccagcattgaaactatcctgtgtacttcagcactgtgtcacagccacacccacatgcaacatccccatcctctgtctcttcatctcctgtcctccccttgtctgtttcgtgtgactgctacactaatcctatgaattaggcttgattatcttgattttacaaataaggaaactgaaactcagatggtataatttgcttgtggccacagagctatttggtggtagaaccagcatctgactccaaagtgtgtgctttactgatgcattgcaccctcttaagtcacgtgttgagttgttgagccctgcctaacgaacccaaatgatctgaaaactttacttacttttatcatggacttttacagctgacttgacttggaaaacttaagtaatggttattttccttgtgattggggagtctgtctagtctacctcctactgctctctctgcaattcagcagcctgcctgccagttcattttggctgagaagagatgctaccttccttttggaacctatgggtgggaattcagacaaacaggtcatcaggttcagcttggtggcttctgtgtgtgtgtgtgtgtgtgcatatgcaaatatctccaaatgaaattttagaaatgaagttttcttacaaaggcacacagtggtgatagattgggctgtagatattcccttccagggcagattctaagaggggaattggctgtagatattcccttccagggcagaactgcattcactactttgaggacttgcatttctcctttgggttatttaggaggtgtacccaggagctgcctggtttgggttttctctgctccctgtagtcttccttctattaggcaaggtgtcacccttgggcattcctctccctttcccatatcccattcatctgcaagtcctctcattttatctttcattatattaatccaaatatatcttgaactcatctactcccatccagtttcccatctctccttgagggcagaccgccatcatctcctgcctggacctgtgcaggagcccccagtttctggtctccctccctgctccctacttcttccctcactgcccccttacctctccctcccttctcttctctttaaaaaagctcataatgtattcagcctaaaaaaggaaagaaattctgacatatgctaaaacatggataaaccttggggccattatgctaagtgaaatgagccagtcacaaacagacaaatactgttatgattctacttatatgagatacttagagtagtcagaatcacagaaacagaaattaaggtggcagttgccaggaactgggtggggagagggaatggggagttactgtttgatgggtataaatttcagtttctcaagatgaaaaagttctggagattggcttcagggaatcgacttaacactaccaaactgtagacttagaagtggttactatagtttacaataatctgtacatttcaaaagagctagaagagaataatttgaatgtttctagcatatgtaaatgacaagtatataaggtactagatatcccaagtacactgatttgatctttacaaattatatgaatgtgttaaattatcacatgtattccatagctttgtacatttattatacatcaattaaaaattgttttaaaaaggttaagatgggaaagttaatgtatattttaccacaatttaaaaaaactacaggatttcttttagaggtgataaaaatgttctaaaatccattgtggtgatagttgcacaactctactaaaacccattgtgcactttaattgggtgaattgtatggtatacggatgatgatctcaataaaattgttaaaaaacttaatctcttttattgcaaacctgctttataatatccatcagggctgacctctgtttcctctgtgctcctctacagggattcagagatggttttcatgaagagatatctctgtcttggctcagctccaaaggctagtcatttctgtcccaaactgaagttccctagaaggactttggtttggttgtacccacctcttgggatgagatggaggatgaggagtggcgggaaagtgtaccatgatggcagaactatcagaggtagttgtgtgattattttaagatgattttttattctttgaaaatataaaattggcactgagcatgaaagaacaattgtgagtctgctacacagtgtagcccacccagttctgtcctgatactagggctttcggacccattcgtcactcattcattccggaaatgttgggccctctctgtcagaccctaaagagagacaggcacatatttcatgatgtgatgttgaaattcaggcatacaatctcagactttctttgcttggtgtagtttacttaggagtaaaaatgtataaaacacacaggaatagcataacaggaaatgttacagaatccttatgaggaaaatcacaaaaatttactgaatgacataaaaggagacttcaataaagggagatatgtgctgccagtttctctctgtgtgataaagatgtcagttctttccaaagtaatgtatcatttcaccccattccaatcagcatctcagctggggttttctttctttctttctttttttggattgtgtcaaattattctcaaatatgaatatgctagctggaattgccaaaaaatttttggaaatgatgcataatagaggagatttacatttccagatataaaatgtactcaaatgatgctaattaagaccacgtggttattattgcaggaacatgccagtaagtggaacagaatagtctagaaacagagcctaatgtgaaagagggtttagtacatgatggagggaaaggatgaattatttaatatattctaagttaactatttggaaaaaatgggattagagcctttcctcaccctatataccaaaataaattttgatttgatgcaaaaattttaataataaaaaatgaaaagtaggaaaaattgtggttaactctgacattagggaagtcaacagaaacaaaatatcactggaggaaaatgactcatttctccatacagaattaatatatatatagttttttgagacagaatctcactctgtcacccaggatggagtgcagtggtgtaattctggctcaccgcaacctccacctcctgggttcaagcaattttccctgcctcagcctcctgagtagctgggatttacaggcatgtgccaccaacactcggctaatttttacatgttttagtagagactgggttttgccacgttgcccaggctggtcttgaactcctgacctcaggtggtctgcctgcctcagcatcccaagtgctgggattacaggtgtgagccaccgcgcccagctaaaattagtgttttaataagtaaaaaaactcccccaagaaattaaaattaagatgctggtaaaaaaaaaaatctaagaaaaacacatgcaacaaagcattaattttgttaatatagaaataagaacaacactaaaaccttagtgggaaaattggtgaaggcagtaagatggcaattaacagaataaatacaaatagctaataaacacgaaaaaaatcttaagcctttcaatgcctcccactttacttaaagaaatacattttataggatggcttatatgtgccccttaagaaaatcatgttttcaaagaactcttaatatcctaaggaaatgagtttaatatgaagtggaaacaacaggagacaaaatagtgtatcaaaaatctgtaaaacagagaaacatacaaaaaaattggtaagaaattcactgaaagttaagtaatgctgttggaaaggaaagaaaagagttttaaatttgagctatttattataccattggtagaaatgtagattggtataacttttagataaatcaatttggcaggtcttattagaactttaacgagtcaatgaatgccatcccaagagtttatttttgagaattctcttaaggaattaattagagatgcaaccataggtttatctatgtgaatgtaagtcagtttattgatgaaagtttaaaaattgggaacaagctataaatccagcaatgagaggttacttaaagaaattaaatgtacttgatatcatgtttaatggtagaacaagatgtaagattataaatataacatgttcgcattgtgataaaagtatgtaagcttagaaatgacattggaagtaagtgcaaaatgttaattgtgatcatatgtggttagtgggattgttggaaattttaattctttttgtttcttcatgttttccatattttcttctttgaacatttattacttttataatcagaatcttgcttcatagaatacttattatttaagcaaacaattcattgatatttcaggaattatacaaattctgtaggctactgatatttaccagttaacattcttaagaaatggaggccgggcgtggtggctcacgcctgtaatcccagcactttgggaggccgaggcgggcagatcacgaggtcaggagattgagaccatcctgggtaacacggtgaaacccagtctctactaaaaataaaaaaaaaattagctgggcgtggtggcgggcgcctgtaatctcagctactagggaggctgaggcaggagaatgacgtgaacccaggaggcggagcttgcagtgagccgagatcgcaccatcgcaccatgcactgcagcctgtgtgacagagcgagactccatctcaaaaaaaaaaaaaaaaaaaaaaaaaaaaaagaaaaaaaagaaatggagaagggaaatctttttctcaatcacttttaaggatttgtacctacttccttgagatctaatatagtttgagtgtgagacctgaaaggtaatagtaggagagtccccatttatcctgcagatctatcaaagatcattggaatgggggatgttttttaggagttgaggtaaattctattgtgaaggactgaagatcaataaagaaatgtctcttttttccccaaatgacagctgaggaagaaagatagatcattactcactgcctatttggaggctgttcacgaactgcttttaaaaaccagtgttcggttcagcaactttgccatttcttcagatggtcagttttggtggatctgtttaattagatttaaacatggcatctgtagcctcaataaattcaaataattaagcttcatgatttcttgtgtgttataaatgtcactaaaattgctgttgcagaacagattatttctttggtaattgcaatttttgtcatgaattgtttcatcacttatagtgattagaactttgaaataattccttaaaatggtactcaattgaatacttttttttgattgggtctccttgtccatttttttcccctcaattatttgtgctagtgtacttgccttccatttagataaggacatggaaaatgctttcaaagggcacaatgcccagagttcaagttgtcctgggagggtagtctcagtgttcctttggaagggaagctttgttctagttggttggattccatctgggagcatgcatgataaaggtttttgggaggttaggactggcctgtggtgtccatcaataaccaaaggccttctgagatgttcgcccgtttgctatgcttctccatctcttgggaagtagcctagacaatagtgacatgaaagaggtggttttggcagccaaatggggcctgcctctcctgagcatcaatgctagacatctggaggattctacagatcttcctatctgctggtcaatgattgaattgacaattttgacaacttgatgtgtgctaagagagtcctaggtgctgtggatgcaaacacatctttatctcctgccctcctccatgaaataaagacatggcttctctgcctagtgaactggctattgtcttttctgttcaccctaatgtacagttccctctaaccaaacaagatgctctgctgtctctgctcacattgctgctatttctacctggaatcatctgtaacactccttctgtttcagcaataaaggttctggtttttcaagtccagctccatttccgtctcttctttggaactttcctcaaaccccaaagccagaagcagtggctttgctctctgaagattctgcatttgtcttcaaggcaggtgctacatcttaccttgtagtgtggctatttgtgaacatctttttgccttccacagggcaggaaaccatttgacttacctttggtttcctagagaaagaagtaaatatgcttgtttgctgcatggatgaaatgccttttagatatgttcatctaggacaaatatgcaatgggggcaagcatttcagcatttgacccagggttgtacccagccagtggtattgtctgacaacttaccgagttactgaaaactcagtaagatgataatatcagtattaggatcagtaatgcaggtcatcattttatttcatttttattttaaaaatttatttaaaaatgcaataaaatataacataaaattcactattttaatctgtgaacttctgtggcattaagtatattcacattgtagtgcaaccatcaccactgtctagctccagaatttttttcgtcttgcataatggaagcactgttctccttttctcccagccccaggcaaccaccattctacttgctgtctctgtgaatagtttgactactctaggtgcctcacataagtcaggcaggaatcctaacagcatctgtctttgtgtgtctggcttatttcacttagcataatgtctttaggattcattcatggtgtgtcatatgtcagaatttcctttttttatggctgaataatatttcgttgtattatatactacatttaaaaaatcttttcactggtcagtggacacttgggttgtttctaccttttggttattgtgaataatcctgccatgagcatgggtatacagatatcttctccagtccctgctttcagttcttttgggtgtatatccagaagtggaattgctgagttatatggtaattctatgtttatctttttgaggaacctcagtgctgtttttccatagcagctgcatcattttactctcccatcagtggtgcacaatttttccatatcctcataccaacacttgttattttctgggttcgtttttgttttatgtaataaccatcctaaggggtgtgaagtggtatctcattgtggttttgatttgcatttacttaatgattatggttattatcttttcatgtgcttattggctgcagtttatcatttgagtagttatttatctagacattgcacaaaaactctttacatgcactgtcttagtccattttgtgttgctgtgatagaataccaaagacggggcaatttataaagaaaagaggcttatttagctcatagttcttcaggctgggaagttcaatggcatggccttggtttctggtgagagcttttaagttgcatcataacatagtgagaaggtcaaaggggaagtggacacatgcaaagagacaaaacacaagggacatcctggctttgtaactatccactcttgcaggaactagtacattttccttgagaaataatccagtcttgccagaggaagaactcactcactacctccagaatggcaccaagccacccaccagggtgagaccctcatgacccaaacactccccactgggtcccacctcccaacaccaccacaccggggatcaaatttagacatgagttttggtggggacaaacaaaccatatccaaatcatggcatataccatctcacttattcctaacagcaagcctgtgaaaaaggcagttatagtatgttcatttcatggaagatggaaacagaactctgagcagttaaataacttgtccagccccacgcagccagtgggtgactgagctggtacacaaacccaagtgtgtctagttcaaaggctgtgtgcttaatcatctcctgaaccatgcattccaagactgtttggctgtaggtaacagaaaacctctcctacactgatttaaagaatgaggagtttgtttttcttacttaataactagtctgaagggctatagctgctgtccttgcctcattagctcaacaacatcagagctaacatctgattctctgggtctttcccgtatggctccctcattgcttcctgtttgtggggtggctgttacagccccaaacattacacctaggatgaagatggggagaagaaataagggccaaactagcttggactgtctttataaaaaattaaagcaaaagctttcatagaagcctctgaacagatttctacagacatcgctgtggccagaactagatcatgtgatgacccctcagtgtaaagaaggcaagtggatgggtgactctgccatctctgcagtgaaaggcagcaagggaaaaggtgtttgccgtggcttttgggcagccactcaacagtcagttacggtatacatttctggaggaatccagggtttatttttccttaattagaattctaaagccaaaatgagagtgattaagttcctctgccgcattttaactggaaacaaattttatgtcaaaatcttctccaaccaaggaagacatatacaaagataatgaaaataccaggagaggtggataaaaggtttaagtccaatcacttagtagattgtaaaggactatgcaaatgtagttttgctaggctgggagcttcctggggcagaggctgtgtctcatcattgctgaatccccagggtctagcacagggcctgaaacatcatgggcaaaataaataggtgattacagaattggctgaagcatcattttaatatgccagtggtagaaaagcttccaggacacccagctgtcctggatgaaggaagaagctgtctgtgaattgcggagtatgagctggggtgatggatagtctttttgcccacctgtgaatagagcctttggtatattctataataatgctataggtaggtttaaatctaaatttaaattccaagtaaatacactgtggcagaaatcagccagcaatgtcatctttttaagatggatcacctgccatgtggctctgtgtgctagaatgttgaacacacctctgtgtagtaagattagtatcatgtgtttatcatcctcatcaaacgctgtttaccagctgcctgggggagcagcaactgctcaatatgaaatgctctcctgccttcccaagtacttgctattctggcctggattgaggtggacacacaggaattgaagacacacttcacaaggtgtcctagaacagccacgtctctggagagaccactcaggccagattctacaccaatcatagtgtacacatcagcttgcttaatttctgccatagtgttgtaagatttaagtggtcagtccatccaggatttgaatagagatctctggtctccacagtttagtttttctcctctcttttgggttatagatggattgatctcttgggtctacagtgacttcagtatcagtatgggctaaggattgaactgtggattaagagtccagggtttaataaaccacagctctgccaaagaagacaaggctttgggaaatcccctttccttttctaggcctcagtttattcttctcagttcatgtgggcatgctgaatgtgctaagccaaatcatacttactgattgcctactatgagctagggaatgcactggctctgaggccgttgtactgagcatgttgaacttgtttctgccttcatggagcttacattcagcaaatgtgacagccattaaacaaatacttatccaagtaagtagtaattacagtggtggtaagtgctgtaaaggaaagtataatataatgtattatgtaatgagagacctgatataatgggggtgggggtgagctggaaacatttcacagagaaagttctgccttaaacagagatgaagggtacatgtaagttttctgtgggattatgttttgcgggatatgtgatcccaaggggcagagtcacgtctatttccagagacacagcagcctgagaaagcagaatcctgctgcatttcaggaactgaaaggagaccaatctgtgggaaaacaatgagtgaataggagaaaagcaaagactgctggaaaagtaggcagggcccagatcctcacagcatcatgaaaaccatgtggaaattttggtatttatccaaagaataaagggaaaccactcaaggtagggcgagagtaccatcatcagatgtaagtctgtaaaagatcattcttcttgcaggatgaaaacaggttggggaagaacaagggcactcaggttggagggagttccatcagtccatgcgagagagctgttattggcttggatgatggcagcagtggagatggagagaagctgaagggcttgagagaaactcaggaggcagaatggataggatttagtgttttactttaaggtggaggaattaggaagagggaggtgttaggacaactcccataattctggttgtctgtctttgcgggtgggtgggctagaggccagtgaggagagccagaggggacccacagtttggcagcaggacattgagggagaacttaatgcctaacagggatgaactagtgcttctggaaagcttatctgagggagaacgcaacatttccattcagtgagtagacagagtctacaaattttccagggaaagatgcagaatgaaaatggttgacacaaacagtgaaaggaagttagattccatgaggtccagcaaaccatgagtaactccaggaagagtcggtggagttgccttgaaggacaggttggggactggctctcccatggccatctcgcctggttggttggctgtgattgcctctgaactgggcttccctgcctttccattttccctacatgactctcctagtgatgtgactgtgtctcagaaacctcttgcttaagaggttaaaaggctgaatgaaggttctttgttgtataaaggatacagtctaccctctcagtctctctcctactactgtcctctccactttctccttccttcacacattctaacttgtttttaacctgagtccagccaggttacaaagagattggtatgtctacagtggccccagggagtgacttgtgctgggtcatggcttggcttatccatagaaagtcctgaagtggacagaaatggaaaacttctgggttctacagtgcaggtacaagtaaagggagcttactcctggcacagcagtacctttgagcatggaaacaggacttggccagggtaacaatgacttgctgagtagccaaagtttctgccttttttttttttttttttttagacggagtcttgctctgtcacccaggctggagtgcagtggcgcgatctcggctcactgcaagctccgcctcctgggttcacaccattctcctgcctcagcctaccgagtagctgggactacagccacccaccacagcacccggctaattttttgtatttttggtagaggtggggtttcaccacgttagccaggatgttctcgatctcctgaccttgtgatccacccgcctcagcctcccaaagtgctgggattacaggtgtgagccatcgtgcccagccagttactgccttttacggtaagacaagttgtttctgggttccaacccagagtggagtagtagggagatcatagttctgagatctttggcctggtaggcatcttactccatgggggattctggatgcacctttgtgagaaaacaagggagaccacatagagctcagcccttgcccatgcccttggcttcttcctaaccctggccctgcttagctgcttcttccagagtaaatgaaaaaaactgtgtttttatggggacattggtgagatacatgagcacagcccacactgcttttgggcccaagcataaaagtatcaaccagtgttgtggagaaaggcttctctccacttcagcagtgaacacagtgcttttagtaaagataatactagctgctataggagagaaatcccagcacctcagtgggttgggggagggttctgcttcttggcatcattcagggacctaggctactgggggcagctgctctctctgaatccactggcaaatggggaaagaatatgagaaggcatacccactctcttaaccgttcgacctggaagtgacacacattatttctagtcacttcattaggaagaattagtcacatggtcccacctacatgcagaggggtctgggaaatgaagtccttggcttggaagctgcttcccagcagtgcatctactctggaaggagaatgtgaatggttggtggaccactcactctgtgccacatacagcaatattgtggtgcaccttatggaagtccgttggcatctgtgacccctggcagagatgtcagcactctcagggtgttgtgcgggtaggactgagcaatgggggtgccagactgggaaggattccttgtgaactcttgtttttgcttctggggactcccagaaataactgggtggcacttctggtagcaggagttcttacatcatgtttaggcagtcacccataggttagagcaaggcctataggtatatgatgtttgaggaaactcaggtcacatgtaataagaattttccagagtttttctaggggagatgatccacattcgttccatagaaatatcctacaaatgtaggagaataactcaccaggctgcccttgttagaaatatgtcgaacatcaagattgcttcaggtaatttgtcaaagctcagccctgaaaagccctcatttcttttgttgatgtcagttggtatccaaagagtataccgtacctgagtaagagttcctgaaaaggtgtgcgttcacattgggtgtccagaattctcattgcctccctctgcattggggagtaagcagttgataatcttatcaccaaatggactgcagttgatatgtaaaaaagttatgccatggtatatatagattaaaagcaacagtcaaataacagcaatgatgataggcagctaacactaattgatcatttactgttggccaggcatatgaactgtgcagtactttataagccaggtactcttgtcatgtctattttatggatgcaaaaactatagcaatccttcaaaggtcatattgtagagatgtggccaagccagggttggagcccagctgttgggtgtagtacctaatttctggatagacgctaagctagaatgagttggtgtacttctggcaaccttttttttttttttttttttctgtaatgtacccttaacaatatagaagatgaatgcataccccaaagggggtttgagggtttggggagtttaactagaagcatgtactgcagtaggaaatgtctttttaaacatcttaataaattttgtgaatatggctttctattctataatatagtgtgactcttttaccatgaaaacattttcattttatcctttctaaatttccatgtaaaattgacactcaagaaaatatgcaccatgctatttagtggcttgctgtactctctggtaaaatgcagggcactgatagaggtaagcaggtcccagcttgagaagctttgatatatagtttgctaaaccagaggttgtagatgtgtgatcagcatccagacactggcgtgcaaacacagatatctgggcaagcttcagttctttgtagtgctgtgttatattgtgattcagcaacattattagagttgtcatttgcttcagaaaatgcatgtggtattctctttttttttttggagatgaatttgtcagcaggatttcaggtcattcttttttggagggcaggttgtggaggatgtttgacgtgacacagatgaaaagccacacatgggagcaggagataatgtgcagtaggatatatctttgttgaatattctctcatgtctccaggatcatagtcttttgccataccaatgctttatgggaatccagaaaataaacaaccagagcagatcaataagtacattagtaataagtgtatctccactaggtaaggccattgtactaagcccaatcttaagtgttggtttaaaatattagccttgtgaaagcactttagaagtagtcaatagaaacaagggacagcctgaaatatttatatttataactgtgttgttcatatttatgaatgtagacaaaccctttggtaaagttctagaatgggaagcttgtattgataacagggaagactgctttttaaaagatcaattttaatgaggaataacttatatgcaataaaatgcatccatttaaagtatacagtttgagatttaacaaatgtattcacgcatgtaaataccaccaccatcaagatttagaacatttttattacccaaactttcctcatgcccctttatactcagtccctcagtcccaggagacctctcatctactttctgtcaccgtagataaattttatgtataagtggaatcatacagtatttaatctttagtgtctggcttctttcccttagcacaatcttttttagatttgtccatgttcttgtgtatatcagtaattctttgttattgctgactactttccattgtatagcttgcttatccattcacctgttgatggccatctggattgtttccagcttgagactattatgagtagggttgtcatgagcattcatgtacagagcttttgtttgccgtgagcattcatggcaatgaatgcttttaacttctgttgggtaagtaactaggagtggaattgctgggtcatatttatagatcaatggaacaaaatagagtgttcagaaatagacccacacatatatggtcagttgaatttttgtttgtttttagaaataaggtcctgctctgtcacccaggctggagtgcagtggcatgatcataacttgctgcagcctcaaactcctgggatcaagtgatcgtcccacctcagcctcctgagtagctaggaccacaggtgcatgccaccgtgcctggctaatttaaaagttttttttagagataggcctttgctgtgttgcccaggctgttctgaagctccttcacttaaagcaatcctcctgccttggcctcccaaaagactgagattacaggtgtgcgccaccatgcctggcttattttgtttgtttttacaaagatatcaaggtgtaaatcactggagaaaaggatagactttcaacaaatattgctggaacaaccaggtatctgtatggaaaaaaaaaatgaatcttcactcatacctcacaacatatacaaaaataaacttgaaatgggttatatggaaaaaaacatgaagatggctgaataggaacagctccagtctacagctcccagtgtgagcgacgcagaagacaggtgatttctgcatttacaactgaggtactgggttcatctcactggggagtgttggaaagtgggtgcaggacagtgggtgcagcacaccgagcatgagctgaagcagggcgaggcatcgccttacccgggaagtacaaggagtcagggaattccctttcctagtcaaagaaaggggtgacagatggcacctggaaaatcgggtcactcccactctaatactgcacttttccaacagtcttagcaaacggcaccccaggagattatatcccgcgcctggctcagagggtccattgccatggagcctcgctcattgctagcacagcagtctgagatcaaactgcaaggcagcagcgaggctgggggagaagcacccgccattgccgaggcttgagtaggtaaacaaagtggccaggaagctcgaactgggtggagcccaccgcagctcaaggaggcctgcctgcctctgtagactccacctctgggggcagggcatggaaaacaaaaggcagcagaatcctctgcatacttaaatgtccctgtctgacagctttgaagagagtagtggttctcccagaatgcagctggagatctgagaacagacagactgcctcctcaagtgggtccctgacccctaagtagcctaactgggaggcaccccccagtaggggcagactgacacctcacacagctgggtactcctctgagacaaaacttccagaggaacaatcatgcagcaacatttgctgttcatcaatatttgctgttctgcagcctctgctgctgatacccaggcaaacagggtctggagtggacctccagcaaactccaacagacctgcagctgagggtcctgactgttagaaggaaaactaacaaacagaaaggacatccacaccaaaaccccatctgtacgtcaccatcatcaaagaccaaaggtagataaaaccacaaagatggggaaaaaacagagcagaaaaactggaaactctgaaaatcagagtgcctctcctcctccaaaggaatgcagctcctcaccagcaacagaacaaagctggacagagaatgactttgacaagttgagagaagaaggcttcagacgatcaaactactccaagctaaaggaggaagttcaaagccatggcaaagaagttaaaaaccttggaaaaaaattagtcgaatggctaactagaataaccaatgcagagaagtccttaaaggacctgatggagctgaaaaccaaggcatgggaactacgtgacgaatgcacaagcctcagtagctgattcgatcaactggaagaaagggtatcagtgatggaagatcaaatgaatgaaatgatgcgataagagaagtttagagaaaaaagaataaaaagaaatgaacaaagcctccaagaaatatggggctatgtgaaaagatcaaatctacgtctgattggtgtacctgaaagtgatggggagaatggaaccaagttggaaaacactctgcagggtattatccaggagaacttccccaatctagcaaggcaggccaacattcaaatacaggaagtacagagaatgccacaaagatactcctctagaagagcaactccaagacacataattgtcagattcaccaaagttgaaatgaaggaaaaaatgttaagggcagccagagacaaaggttgggttaccccatcagactaacagcgtatctctcggcagaaactctataagccagaagagagtgggggacaatattcaacgtccttagagaaaagaattttcaactcagaatttcacatccagccaaactgagcttcataagtgaaggagaaataaaatcctttacagacaagcaaatgctgagagattttgtcactaccaggcctgccctacaagagctcctgaaggaagcactaaacatggaaaggaacaactggtaccagccactgcaaaaacatgccaaattgtaaagaccattgaggctgggaagaaactgcatcaactaacgagcaaaataaccagctaacatcataacgacaggatcaaattcacacataacaatattaaccttaaatgtaaatgggctaaatgctccaatgaaaagacacagactggcaaattgaataaagagtcaagacccatcagtgtgctatattcaggaaactcatgtcatatgcagagacacacataggctcaaaataaagggatggaggaagatctaccaagccaatggaaaacataaaaaggcaggggttgcaatcctagtctctgataaaacagacttcaaaccaacaaagatcaaaagagacaaagaaggccattacataatcataaagggatcaattcaacaagaagagctaactaccataaatatatatgcacccaatacaggagcacccagattcataaagcaagtccttagagacctagaaagagacttagtctcccgcacaataataatgggagactttaacaccccactgtcaacattagacagatcaacgagacagaaagttaacaaggatatccaggaattgaattcagctctgcaccaagtggacctaatagacatctacagaacactccaccctaaatcaacagaatatacattcttctcagcaccataccacacttacttcaaaattgaccacatagttggaagtaaaacactcctcagcaaatgtaaaagaacagaaattataacaaactgtctctcagaccacagtgcaatcaaactagaactcaggattaggaaactcactcaaaaccgctcaactacatggaaactgaacaacctgctcctgaatgactactgggtacataacgaaatgaaggcagaaataaagaggttctttgaaaccaatgagaacaaagacacaacataccagaatctctgggacacattcaaagcagtatgtagagggaaatttatagcactaaatgcccacaagagaaagcaggaaagatctaaaattgacaacctgacatcacaattaaaagaactagagaagcaagaacaaacacattcaaaagctagcagaaggcaagaaataactaagatcagagcagaactgaaggagatagagacacaaaaaacccttcaaaaaatcaatgaacccaggagctggttttttgaaaagatcaacgaaattgatagaccactagcaagactcataaagaagaaaagagagaagaatcaaatagacacaatacaaaatgataaaggggatatcacgactgatcccacagaaatacaaactaccatcagagaatactataacacctctacgcaaataaactagaaaatttagaagaaatggataaattcctagacacatacaaactcccaagcctaaaccaggaagaagttgaatctctgaatagaccaataacaggctctgaaattgaggcaataattaatagcttaccaaccaaaaaaaagtccaggaccagatggattcacagctgaattctaccagaggtacaaggaggagctggtaccattccttctgaaactattccaatcaatagaaaaagaggaaatcctccctaactcattttatgaggccagcatcatcctgataccaaagcctggcagagacacaacaaaaaaagagaattttagaccaatatccctgatgaacattgatgcaaaaattctcaataaaatactggcaaaccgaatgcagcagcacatcaaaaagcttatccaccatgatcaagtgggcttcatccctgggatgcaaggctggttcaacatatgcaaatcgataaatgtaatccagcatataaacagaaccaacaacaaaaaccatatgattatctcaatagatgcagaaaaggcctttgacaaaattcaacacacttcatgctaaaaactcttaataaatttggtattgatgggacgtatctcagtaagagctatctatgacaaacccacagccaatatcatactgaatgggcaaaaactggaaacattccctttgaaaactggcacaagacagggatgccctctctcaccactcctattcaacatagtgttggaagttctggccagggaaaactggcaggagaaggaaataaagggtaatcaattaggaaaagaggaagtcaaattgtccctgtttgcagatgacatgattgtatatctagaaaaccccatcgtctcagcccaaaatctccttaagctgataggcaacttcagcaaagtctcaggatacaaaatcagtctgcaaaaatcacaagcattcttatacaccaataacagacaaacagagagccaaatcatgagtgaactcccattcacaatggcttcaaagagaataaaatatctaggaatccaacttacaaaggatgtgaaggacctcttcaaggagaactacaaaccactgctcattgaaataaaagaggatacaagcaaatggaagaacattccatgctcatgggtaggaagaatcaatatcgtgaaaatggccatactgcccaaggtaatttatagattcaatgccatccccatcaagctaccaatgactttcttcacagaattggaaaaaactactttaaagttcatatggaaccaaaaaagagcctgcatttccaagtcaatcctaagccaaaagaacaaagctggaggcattaccctacctgacttcaaactatactacaaggctacagtaaccaaaacagcatggtactagtaccaaaacagagatatagaccaatggaacagaacagagccgtcagaaataatgctgcatatctacaaccatctgatctttgacaaacttgacaaaaacaagcaatggggaaaggattccctatttaataaatggtgctgggaaaactggctagccatatgtagaaagctgaaactggatcccttccttacaccttatacaaaaattaattcaagatggattaaagacttaaatgtcagacctaaaaccataaaaaccctagaagaaaaccttggcaataccattcaggacataggcatgggcaggacttcatgtctaaaacaccaaaagcaatgtcaacaaaagccaaaattgacaaatgggatctaattaaactggagagcttctgcacagcaaaattaactaccatcagagtgaacaggcaacctacagaatgggagaaaatttttgcaatctgctcatctgacaaagggctaatatccagaatctacaaagaactcaaacaaatttataagaaaaaaacaaccccatcaaaaagtgggtgaaggatatgaacagacacttctcaaaaaaagacattcatgcagccaaaagacacatgaaaaaatgctcatcatcagtggccatcagagaaatgcaaatcaaaaccacaatgagataccatctcacaccagttagaatggcgatcattaaaaagtcaggaaacaacaggtgctggagaggatgtggagaaataggaacacttttacactgttggtgggactgtaaactagttcaaccattatggaagtcagtgtggcgattcctcagggatctagaactagaaataccatttgacccagccatcccattactgagtatatacccaaaggattataaatcatgctgctataaagacacatgtacacgtgtgtttattgcggcactattcacaatagcaaagacttggaaccaacccaaatgtccatcaatgatagactggattaagaaaatgtggcacatatacaccatggaatactatgcagccataaaaaatgatgagttcatgtcctttgtagggacatggatgaagctggaagccgtcattctcagctaactatcacaaggacaacaaatcaaacaccacatgttctcactcataggtgggaattgaacaatgagaacacatggacacaggaaggggaacatcacacaccagggcctgttgtagggtagcgggaggggggaggaatagcattaggagatatacctaatgttaaatgacaagttaatgggtgcagcacaccaatatggcacatgtatacatatgtaacaaacctgcacgttgtgcacatgtaccctaaaccttaaagtataataaaagaaaataaaacataaaaactgactaataaagataaaaaaatagaaaaactttccaaaaaaactgaaatactagccagcaattagaaaggaataaatttttgagatatgcataagaacaaactattggtaatagatgtatctaaaatatgttgaattaaaatagccagatacaaaaagtacagactttaatgttttcttaatgtaaagttctagagcaggtaacatttatcaattgtgacagaaatgagatcagtgagtgcctggagtggaagctgagagaaaggctgactcaaaggagcatgatgggactgtttggggtaatggaaatgtcctataatatcttgactgattggtgtggtggttacacagtgtatgtgaatgtcaaaagtcatcttctgtaacttaaaatgtgtgcatttgacagtaatttttcctcagtaaaattgatttttttaaaaaaatgaaaaaaaaaaaaaaaaagaaatgggttatacacacctgaacgtcagagtaaaatgtaaaactataaaacttctaaaagaaaatcttcattaccttggagtaggcaaagattttttagataggactcaaaaagcattctcatatgagaaaaaaaactgaacttcattaacgttaagaacttgggctcttagaaagtccccattaagaaaatgaaaagatgagacacctgctgggagaaaatattttatatacacacatgtgcatataaacattcatgtacacatatatctatatatgtggatatgtatatgtatgacaaaggacttatacccaaaatacataaagaaatattacaacttcacaatgagaggacaaaatatttgaacaaaaacttcacaaaatattcaaaataatcaaatattcaaaatatttgaacaaaaacttcacaaaaagacatctataagtggccagtgggcacataaaaatgttcaaaattagtacttatggaaatgcaaattaaaatcacaagaagatactatttcaccttcatgatagtggctaacatttaaaagtctggcaatgcttggtgctggtggggatgtggaactctcactgattgttgctgagagtgtaaaatgctacacttgctttggaaaagtgtttggcagtttcttattaatattatttttgatagccttctgattctttcttagttacagttacagttacatcctccactgtatcttttatttcccccagttttatggctctttggggagagcaataggttttctcaagttccgttattatttttgaggaggattatataaggctatcacttttgctcctctgcttaactaaaagtaatatcaaagaatgcgataggtatatttaaaaagacaattactgtaggaaaagcagctaatatatataactaatgttgattctgagaacccatgtagttaccatttccagagttctttatatctttgtgtagatccaggtttccatctggtataatatttattctgcttgaagcatttaatttttttttttcagaggggaggatctgctggtgatgaattctgtaaggttttgtatgtctgaaaaagtctttattgcaacttttgaaagacatttttgcttggtatagaattttatgttgacagttttttttttccagtactttaaagatgttgctcttctgtcttgcttgcgttgttttcagcaagaaatgtgttcttttccttttctattgtcctctgtatgtaacatgtctatttttcctctggctgattttaaggttttatgacttcttctctttatgactggtttggagcaatttgatatgagcctttgtatccttttcttcctgtttcctgtgactgaggttcattgagattattggatctgtgggtttacagtttttatctacttaggtttctaagaactaacaaggtgacttgagcttttgggatatttaggaagatatgatttctcagggttgccaagataacagtgacagctaatgtattttcattcaattaagttagcaggtaagtaagtggatatagatcagcaaaagtttctctttttttcccagaaaccttaagtgagcttgccaccagactcttggttaagaaaataaggaccttcatttaaatttttattcatctgggcagttgaccaggtagagatttcccatttgtggctttttggctcagtgcttattggaatcacgcttctggaatgtgctgaagaattcctctgaaccagggaactgcctgtttaccccataatggggatccaagcagttttcattcttcttcacaatggagggagagggaaggacctggctgtcatcttgacctcatcctagaggacccttcctaccacctttgggtgcatgtccctcaaccttgggcctctgtagctcacagtatgcttcttaaccactggccttcattagtcacacaaacatatggcttgtgtttctcctcctccctcacaaatcctatttaaacagtcagcccagagaattaccagtagcactgatttagctcacaaatatttgtgtgcttgtaatagaaagggattgccttttgtgatcggaatctcaaactatatgggttcttctctatttatctcaccttcctccctaattgaggaactattcataaatctctatttacacatttattctgaaatacatttttctcatcaattttaaatttaatcccccaaatggcttgtatcctttaagtaggacttagaaatactatcttgtatctcctcttctggcttacttgtaactgtgctagttcctaaattggaatgcttccctagtcctaattgaatgttcatttgtggattcaggccaaattcagattcagggaggtctttgatggaaaaagctttgatcagcaaagatatagcacctaagggacaagatgtaatatcctccagttagtaaggggggtgggcggggacatacttgggattatctatgacttttttggcttcagagtatgcagcttttgaaactccagatcttaggtgctaaaatataaagtcttggaaaatattttttaataccttccagaaacacagagtgcttatttcaggaattactgaaaatgtaaatctctgttattttattttcccagcaatgttattaataggtggatacatggtcacatcccaatttagtaaaatttctccagcaataaatcatgaccagaagggtattttcaatgtttcgcccccagcaagtgaatgtcttccatttaatatggggaaatgtaaacagagcaagcattcctgtttcttcaggctttaaaatcattaataaagatgtctttactctagaagggaaaggtggtaagcagtcacatttttattattctactgaataagtgaatttacccagcacataaattaacaaatacattttttccctgcagcacatgttgacattttcctgcagatggctcagcagaaggggaagcttgaaaggtggttagtgacaaaggacaggcatgtctggtcactctcttttgccactcagaaatactggcctgctcacccctctcacccagccagtgtacttgcttggaggggaagctttgtgattgcagacactgtagtgaaggatagaggaggaataggaagtaagcagaatctgtctgatccctaagaattatatttttgctcttctgtattaaagttgttcatatggttataagcaggacaaaacattttcttgtgtgtgttttgtttccatttggaatcatttaccaatcacggtttgtctatagatgatattttcttgaaccaatagttgggagacaggttatttgacctgtaagtgcacatatatttgtttcaggagaacaggtgggtggagggagggtaatttctgttttaaaaaagtgcgtgtggggctgaggaaattcagattcttgtcatgaatatacctggtagaacccttgtgatagacaaactagttgttgatgggaacaggtaggggctcattatgaacagtttggtacttcttgattatgtgagataaatgtttaatcaggtatttgggactgaagtttgtatagaggcagaagccttccaaatagagttgtgacatcacattataccctgatgtgacatagggcatggtactgctccctccaaaggtcgtgccttcagagaagccaggagtgtagctcaggtcttggtttgagggctgtgatttatgctcaggtgggatggagttcatgccaggagctgtgaaggaatagatgtggctgagatcttccaggaaggcaggacaagatcagggggaaactaccctagtaagtgaatagaaatcccattcatctatccactcagctgttaattatctgcttattattattattaaaacagtttaataccaaagccaattttgaaataagagaagttggtaaaatcacagattatggtgcatgtgtggttttttgtttttgctcatgattttaaaaattttgcttgtcatcagtgaaagagaattagtgtttgtgtatttctatattttattccatgagtttatatttaaatgcagtataattctggggaaaaaaaacccaaaatagacgaagagtcaatgagaagcaaagtatagctcttcattcagcagagttgactgagaagaaaagaattttgagctactgtcctcatttctaaaatgaggtaatagtggcctttacctcatagagaactaaataaggttatgactgtaagtttttgatacagcacctccaaaaattacttttaagattttataaaaatagcattagatgctacatgttgtttttaaaggtacctttttttttttccacttaacactagatttgggacagctttctctgttagaacatagtgatctagtcagataatcagagtacacttggactctcatttatcttccaagtcttctgttgaaggaaatttaggtcctctgcacttgtcttctctcacagtgcagtagagaacattcctgcacatttattttgctttatttatttattagctttgaagaataacatctctgtcacttgttcttgaggcctgtgaagggcaacacagtccctgccttggatcacaggcccaggtgaagactccactgaagttccaaggcttcttctgaggtgggaattggagtcaatactgttctctttctgtctgagggactgcttctctttctgagcttcaggagctctgagtgggtcaacctggttcctttcatttggcctaggaatgatgtttcccagacagtgaccctgcgcttccattgtgtccctccctaaaccaaagtggacagctatgcagttgttttctcattcactgacatttcaaggtgacacattttacttggaaaacatctacccatacttagccatctcccatgaattgcctttttcaggcctgtcagctgtagaagggaagttcagctaatgtttcactgtggctcaacttccataggcttgccagatgttcattttggcataaggcactccagctggcagaaattgggtgccaacaggagctctatacctgccccttgtcagtgaggtagaatgggcctgcagagtgcaaacctgtgctctgacaaattagagattttgtctgagtggagtggggcttgtgggcctggaaaatgattgtctggtgagagaagtaatacatgaggacactgttgcattgggctcgtgcagtccatctccatgacaggtggctcttcccctcaactcttcacattgtgggtggattgtttatctggagtccgagggctctgcatcagagtcctagagtgtctctctcccctcattcttctttcgccttggctgctgtgatagccacgcggaccttttctttactgcgtaggtgagggctaggaaatgcagtggaaaaacagtcaacattttccttttcaaggtctaaatagatttttaaattttttggagaaggttgaagctatgggatgaagtgaaagtttggtatttgggagagctgtcattatccattgcatttatttaacttcctgcactttgccatgctctcatttgcaggatgggagcctcacaaggccctggtgagataaacagacccagaagttgttaaccccattttacagaagataaagtgaggcccatgaggggaggtggcacatccaaaaacacacagctgggaagtggcagagtggaaagaagcctggggtctctttgcttccagtccaaggtgcattccagaacatcacattggttactcagagggattgtcttcaaatgccaatagtattatgtctttactgttcttgaaatcttttggggctccttgttaacttcagagtgatgcccaaactcaacatgcccaacaaggtccttggtgatttggccctgcctctccctccatcctcatcactggtgctctccccttcttcaggtgtttgctgtgatcctatagaacaccctccatcttgcctcctgcttgtaactgctcatctctctacccgtcctcattctgtggataattaggtcccatcctataggccttagctcagagctccctttatctgggaagtcttggctagatctcagactgggttaaatagttgtctgttccagctgctcacactgcaccctactccattgtattgtgataggattgtgagggcagggactgcacctgtccttttccccactgtattttcattggggcccagtacagtgcccggtccgtaagagggtgccaagtaaagaccttctggctggaacccatgatgccactggtcctgagaagcatgggcatttgtcacttgcttctggagtttatctaaagcaggacactaggaaacaaactttcctgaggtccccaaacttgatgtgctcatctgcaaggcttggtgctcttctcaaggtggtatttctgccttttctgtggcttgcatcccctcctccctcccagtgcattgctgcctgtctctccatctgggcctccttggagggaaagcaggtctcctttgtgcatgggatgtctctgactgtgcattgggtggtgtccattggagagctggtgtggcacactcccttctgaactcgagctcatgctcacaggtgtgaatcttgcttgcctaatctttgtgatatgccataggcaaagagagctgtccagtggcgtggggtgcagtccctatttaatacttgttgactttattaaaatgcagggatatcttctgggccaattatccaaagggcacagaacggaacttgtttggaataatgaaaccaataacagaacctgacagccgtgatccatgcagccaatgagatgattatcaacaaacagcctttccctggcttcctgcagccagcctgctcataacatcttaaaaaggctctgttgtcatgataaacctacatggtcatcagtttccaagggctggttccccttaacatcttgatcagttcttaaaattaattatcatcaggaacaagtcaaatgatacctcaggaagatccttttaaacactaacaggcagtggtggagtgtctagataagggaaaatagatcagctgaaagatgttgtaataaaccagcagagcaccttgattaagtgcctgtgaatgccgaatatcaggagcatgataataaaggcataaaatgggaaggcttgcaaagataataaggtctgtggtgtgatgatttgggaagtggtgaagctaagggagaatgtgaagttttcacagcttgaggagacagctgggacccaggccagctatgtggtggcagtgggaggtggctcatggtggccattgctagaccatatctgatgtgcctgggcattccttcccaccaccacagtactcagccctggcctgaagcataggaggtagctggtaaatgctaaaccaagctaaactgaatttccattcaaccataggttccctaagggctagatgtctattttgctcagcacttattagtgagcctagcatataatagctgtcaaatgatggaaggaatggagttctggtatgtatatccttctaacctaacagaaacataggaaagtcaaaaccaaaaaacaaaattaactttctcaacccaatcattgtgggcacaatagctagtctcccatggcagctgccatgtgcctcttacccatgtaatattcatcatgtgccaagtattgctaatttatcatgtgttaaaatgctgctaaggctaattttatttaatccttatgggcaaccctaggagatgggtactatcattatgccattttacagaaagtgacacacagctagcacatggcagatttgagatatgagcccaggctgtctgactctagatcctgtgctctgagatgctaggccagacttcctcctccagatttcctttagcccagcactcttcagccttatcccatggcagcctccctctccacctgcatgctgcctatggatctgcgattccccaaacccatggctttggttcagcctgcctgcctagggttatgaagcttatgtctcctatgaagggtataacaaataggattggtacagacactttcaatgcctctaacagtattgcctccttccaggcttttcataaagaaagggaaaaccccctttgaggatggggaggtggggaccatatcttgtgcttcctggatggagtcaggggtgggtggtcatgacactttggagattgtatgggggactggaggtggcctggattccttcagacttggatttctttcccaggagtctgataggctgtgctctaaaatgtgtgtttggggaaggggtttgggagggagatgggactgaccttcgtgaaacataaattgagcactaggcacagtgctgagggctgtcttcccactcacccagtgaggaaagtggagttatcctcccatttttttggttgaggaaattgaggctcccagaggctaagaagcatgggcaaggccatgcagctagtaagtggtggagctgggctgctcctggtctgtctcatgttctttccttgacatcttattctgatttccagggggaattggctgttggtggaggctggtgtcctttaccatgacataacattagaaaatgagctgcaggtagccttaagagttatgcagttaaaaaaaataaagtaaatggggtccagagagggtaaacatgttcctttcacgttggccacagctaggagcttaagctgttcccctttccccttactttttctcaagaatgggtttggattagagacaaagataagctttttatccctgagaaggagggcaagaactgatgtgtttcaagggcacttaggaggtattgcatgctagaggtggcactggcaaggcaggaatgatcacagcaaagggctgtggtgtttcttcttcagcctcagtctgctgggcatcatggttgggcctatatgagaggaaacatgtccctgtctgtctctctcccctccacatccccactcctgactatctgatggtaagaccataccactcaccatccatggtggggttgagggacacctagcctcttctgtcttctataatatatggggagtgtcaggaacacagcactgaataccacagccaaggtctttgttctcatgggccttgtgggctagtagaactaacagacagacattaagccagaaaacaaataaatcatctattttcagttaatgataagtgttgtgaaggaaataagtcaagatgcagtgaaaaaaatcttccagggagatgaaatatcatctacaaagagtcccaggtagtgcagagcttggtctgttgcaggggctgcaaggaggcccttgtgcctggagccaagtgagcagtgggggtgggggcgggagaggcagccagcaagcatagaccctgcagggccctgtggcttggaagcaggactgggatgtcaatctaggcataggggaaagcaccaatgggttttaatctaggaaatgatgtgacctgacataggtttcagatgttctctgtctctatggctctgctgataggtgcgcagtggcttgtgttttcttacagagcagaaagacttgaggttctgttttgtgttggggggagaatgagattctttatgtgagcctgggtgatcggagttctctctatggtctagcctgaatcactggcattttatgttggggtttggactcaagaatgtggtgttttgtgctgcttttgtcttatatatattttttacagggaccttgaggaagggaatatgggctcaggcaggatttaagcattcctgggtcactaccgaatgctaccatggaatagtttcctaatctgatcaccactcccccctctcaggtacaccaagctggtgagtgactgcaagaaccctgggttcctgtgtctcaggaaggtttgatttttatcataacatcctgccctctgggttaagcctgttagtgctgctctttctctgcctcttgtctcttcccaagtttctccccagctgtgaagtgcagcttaaagagcacagcgttgtcacatttccctagagaaaaaagatcaattgctctaaaattgcccattctcctcggacagcagtggtttaaagtgacagctatggagttgaagtaaaaatcttatatctattttttccagaccatgaaattatgtcctgctgcagtacatatttcactgatataattaagctcttaattctttctgagtttatttcagccatgttttagcagcattccaggatgctgttaatgcctcacagtggttaagggcaagaccttagttcaagacccagcttggccactcacttactttttggccttaggcagatttctttctcctgcgagcatcagtgtcctcaatataaaattataatggtagaagctaatggaagtgaacattcatattagtctattgaagcacttgcttgaataattcattgagtcctcttaacagtcctacatggcaaatgctattattatttccattttacaggtgtgaacactggggtgaggttcatttactagcccaatgccacttacctagaaagtagaggagctgggatttaaagccagagtgtgtgttcttggcccctaactagagctatccatagaacctccctctgagggccgctgtgagacttaaatggaaaaatgtgtgcattgcacttattacagtgcctggcatgtagtcagtattcttctctagttctgaagggttgccctcttgaaagacttctaagtagaagggcagaagctttgaatccaaatgggctttctgctgatggtgacagttctttggcatccagtgctcgggatagactgcatgtcaagccattagatgttgacaaggtaaggctgtctgaaaattggtgttctgcccagacccccaggcccattggttgccttcaatgtcgtgggcatgcatctactcctgcctggccttactgctcctgtgggagtccttgctcattgatacacacctcagtcctagaattaatctcttccttccgatgactttggcacctacagcatttggcactggcgtcaagcactaggggctgacaccacttttatgtgtccctaggtatgactgtcctggtgagaggctgcccctgtctggatgcctggctcctgggctataagtatctgttagtggtgagcctctgtaggaggctgggcttctctagcagggagcctacagcttcttgttttgactccctagaaattgggatgtcctctcagctggactgtcacagcaacctggagagccacagcttgcctggggactctgaatcaaggtgtgacagagccaggctgccttccagccacagtcttctgttttctctttcccctcagttcgtgggccaaatgggtgaacagaggagaggtggagactcggccattgcaggaagcctgtgggatggttctgtttgcctggtctgagttcccggatggtgtggcgaagatgtactgttgatccacagcacagctctgaggtcccttgcttacttttctaaccacaaggaatatcctcttaaattaggaatggaaatatttggctagactgggaaaggaattagccaaccttttctctttcccttgccctctgcaatttcgatgttgtcggtgggtttgttcttcttggtacctctcacttgtgtagctgggggcgatctggagctcagatggactcgggaaggagaaacaggaagagccctctatggcccagtagggatctgtctgcccgttcttggcttattcacggtgacagaggtgggacggtgaagttggtgcctggcattcagccctgggctacccgcaggaggaccctcgtttctgactggaaaataggacacaggagaaacgggcagccagctttacctcctgcctctggcccttctcccaggaagtgcaccccaagctctctcccttcagagacttaataacttgcagttcagccgatttatgggactaagataagctcattatgtgagctgtcagtaattatatgaattgatgaggggattccctgttccttccctttgatgcttgcaaaatcatttcaggttgatttcactttcttgacctaaacagtgatgaatttagacattagcttcttttagttcagaataacttctgatctctgcacctattgctttgtaacaagcttgtcttaggtggggtttctcaggaaattttctggcgctataggtgaccaaagacttcgtgcatctttgatacggttgtgttgtctttattttcctaattgttaaatatttattaagagcatcacctgggaggacttcagcctgctggctcctggtatgaatgtttgctgcattggcagccagatttgaatggaaggatggagtatttttaaacataaaaactaataagcacctggaaacgtaactttgtgggtggtgctgatgcagtgtatttctttatatatcagtaggctagtttttcagtgattcatcaaactaattagcatgggagcaccagaggtgacaaacccatgggttaactctggcttgatgtggtttgtttggcctgtaccaacgatatttaaaatgttattttaggccaggtgcggtggctccccctgtaatttcagcactttgggaggctgaagcaggtgtatcacaaggtcaggagttcgagaccagcctagccagcatagtgaaaccccatctctactaaaaatacaaaaaaaaaaaaaaaattagctgggtgtggtggcagggcctgtaatccgagctactggggaggctgaggcaggagaatagcttgaacccaggagacagagtttgcagtgagccaagatcgcgccattgcactccagcctgggcgacagtgcaagactctgtctcaaaaaaaaaaaaaaaaagtcattttgaattagttgttaacatttaaaaaatagaagatgacatctaaaaacatctaaaaatccatacatctggattgcctgattctttgggaaaatcctcagacttgagcacaccagcccatgatcccttttggagacagttggctgtcgtagcagctgccccttctgacggggctggtgtgcacttgccgtgcagcttttttctgtttctacctgatcttctttgtttatttaatttatcagtttggccacatatgcgcatttgagttggtgactccaggatcagagcagtgagtgtggatacgctcagtgagttattgcctgtcaactctgctgcaccatcctggcctgagctaacatctctggtcgggattgacacaaacatctaccagcaggcctgtctgtctcacctttgcatcttccctgttcctcccagcctgagtcaatgctcagcacagaagtcagactgcgcctttgaaaatttaagtcagagcgtatcactcctctgctccaaaccttgctatgggcccccatttccctcagaggaaaagccaaagtacccaccccgtctcgcaggctgtcatgacaggcctcctgttacccctccaagctgatctcctcctcctcctctctgcctcactcgctctgttccagccataccgtcccccttgctgttttttgaacaagccagaccttagttcctgtgcccgtgctgcctggatgccctctagatatctgcttggccaattctctcacttcctcaccaaggaggcctccctcaccatcccatttattactacaacctggccacaccctaccgcctgcatttttcagcccttcagcctgctgtacagtttcattttcccatagcatttattccctaataacacattagatgctttctttatcatgtctcttattttccacttctgtctgctagaatgtgaatttgatgatggcaaggatttttttgtttgtttgtttaccattttatcctaagcatcttgagacatgcctggcacagagtggctattaataaatatgtgttgttggatgttcccgttttctgagtgtttccaggtgcttaacccttaaaatgatgggaattggaggttgtctttctatctgggtgcatactgcccagcagggaagctcagcagaggcagtgcagcgtgactgctctcaactggaggtgtgagggccggaatcctagcagttttccttgatcatcttccgtagtggtctcctagctcttttatctctttctctgtaaatgggaattaaggtgccagtgtatctgtcaaataaagcaaggagtaaatggagaaggaaggaaggaaggtgaagggacaagtttagatggttccagttctgaagtcatcagctgtgtgacctttggcacatttctgagcatcagttttaccatctatgagatgagcctgttgttttggagaattctctgaggtttctcacaactctgtaagccatcaatagttctaagaaggtcctgacccacactgactgtatttcacatttagcaggagaaactttaagtaaaattatttgtgcctctcatctgcactgtgtaggatccataattatttcctaaatctaaatcaatgctattaaaaacatattttttcttattttcagatttcattagaaactccattttgggttcagatattttcccctcactcagtgaaatatgacgtgatttcaaagagctgttttactgggctgtggttttcatatcccttctgggaaggcggggagcaggttgaggtctaacccccgggggctgcttttgcaaccccagcattcacaccgtcatgtgtaattaatggagttgttgagattttcactgccattcttactaaaaggaattaatttcagtcaaagatgaaatgatataggccaactattgcctcagccaagtgacacaaaacacatctcattcccactccaaatggttgtcaataagaaatgacatttaaaaatgctgactaaattaaagtctgtgaaatgctttcttccataatttaaattcatttttgggaagatgtgcaagtctattttgttataatgccataagcatattaacctccgatgaactagagtatctacaatggttgtatcttttcctgaaagcttttccaagagaaacctaacagcttctactgaagcaaatgaaaactcctctgactcaggggaactgaaataaatgggcctattttcttcaagacacgacaggtttgcacttgtaacctgtcttccctggctttttggtgctggcctgaaggtgaaatctgcatgaacagatggggctccttgttgctccttgagagggagatagaatgcctctgagataacactaataaatgcatcatttcaaagtgcccctttccttacagagaaacatgagactaaaatcctgatatcttagacaaaatagaaggctttcttgagtaaaaacacctttagctttcccctaaaagaaagagatgcagggacccaaggagaggtgggtgagagagaaggtgtggggagtttgtgcacatcacgcatatgtgtatcatgagcagattttccttggtgcaagctgtgtgaccttgagaaaattatataacctctttgaccctccatttcccaacctttctttttgagtcagggtctcactgtgtcacccagggtggaatgcagtggtgagatcatgctcactgtaacctcaaactcctggactcaagtgatcctcttgcttcatccttccaagtagttgagactagagatgtgtgccaccgtgcccagtgaatttttttaaacttacatttttttttttttttttttttgtagagatgaggtcttgctatattgcccaggctggtctcaaactcctggcctcaactgatcctcctgcttcaacctcccaaagtgctggggttacaggcatgagacaccacacccaccatacaccatacccagctttaagatgagaatgttaatagtgcctgctgcatagggtcaacctgaggactaaataagatgatgcatataaaactagcacatgataagcacttagtaaattttagcttttattagctatcattttgctaagtttccccctgccccccacaagactctttcttgtccctgttggaatgatggaaagataaactccttaagcactattacttttcctccagttgaagtgtttccatgagtgggacctggtgtacacctctcttgatgacttagtccattattactcgacctgctggaaccatcagggatgacccctggtttctcgcctctggttgtatgttggatttggtacaaggatgcttgatagcccctgttgagagacaggccctctctgtgcactggccccatgcttgtccactgactctggctctggcaaaggcagcacatgaaggggtgggcgggagaggggtttccagcgggtgctctgctgggtaaaactgaaagtggctgtggaagagctgccctctgggtagtgggaaccacccctgatttgtctgtagcttggccttttcttttctctgatccgcacttttcctccctccttgccagctgttctttggaccatctgtgtttgggtgtttgcccatgcagcattgagctccttggctgggagaagcacttaagtcttctcaagggcccgctaaagttctgagtgctgtgtgtgctgagggccctgcaaggaccatttgatggcaactgtgctgaccacactgccacagtactccataaaaccctgaagactagttaggcggagagttcttccacttggttcctcaaagcaggagtaatatattatgatccaaggcactttttttctaggaaatacagcatagcttgcagatttgctgtgctgactgggtggggtgaacagggagagatgagacctctctcaggtgtacatgtgggtagagactctacgtagtctcctggaagacttcagtggtctcctatctacctgtggatgttcccatacagagatggcttgagccccttctctgcgaagactcctatagtctttctttaagtcatttgcatttgtcctggggagctgcagagtctgcataggctggcttggtacagtctctgtttgtggtgacaggctacaagaatcagcctgtatgaggctgtacttggaatactgtcctcttccacactatggtctggtgatcactcgagctggccagaagctacagtgatcgcaaccttatgatgcacacactgactgcagaggggcaagaatatcccagttaacttaacgcccatgtgtgcaagccaggcttttgcagatgaatcagcttctctgcagtttggtggatgagacctgctttagggtagaaaactttgagattaaatagcaattctgtttattttcaggaaatgttgacctcagagatagcaagtccagaaaagaagtttaactctcccagagttaacaagcctagtggtttctttattcccacaaatgtctcccacttttccctgccaacgctgtcaaatagtggagtctgcctgtctgtcttctgttaaggtatagtggttgaacaggagggctctgaagagagacttcctaagtttacttactagtttttttttaaaaaataatttttacaattaaaagcaatcaatttaaaaaatatatagtttgaaaaggtcaacttttaatcactgcacaaagctttcttctgtgttggtgaggtctctctttacgtgcaaacgtctggtctacactggtctttggggttcacccatatctcttggctgggagctgtggtggtggtggtcaatctctgcatggaataaatgttttcgatgatggagacaaagtcacaggttgtttttttttttaatacttaaagaggcaatgtggtgatagtttcatgagtatatacttatctgcaaactcaccaagtcatatagattaaacgctgacagatttttgtatgtcagtcatacctcaataaagcaattacaacaacaacaacaacaacaacaacaacaacaaacaataaagaggcaatatagcccagtagtgaagaagctgtgccctggatatcccctagtaggtttattagaattaaatgagctcatgcctgcaaaaacttgccacgtgcaatgcctagtcctcagtattagttattaaggttactaggtttccttaatgtccccactgctgacatatttcaaaacttttctggcattacttttggcacgctacataggctactgtgactcgaaaagtagaactttcaggaaaaataaaaggcttattataatataaatgtgaagtgcctatcttttgggtggcatgcactatctccttgcctttcattgcataagctttaggatggtgtcatttgtatacagatggtcctcctcactccaattcatttggccctcttcagttctccctagttgcttgcagtgtcaggtttttggaaaatccaattggcgtggtgcatgctgtatacctattgggttagtctctctgccctgttttgtgggctgcagattatggtaggctggtgcatttggcatcttccataaagtatttttcatgcagcttgttcatttgcaggaataaacaagtgttatagtattagattttatcgatcacttaactaggaagaaattatggaaatattatccataaaatcaccataaaaccctgttaatctgccaaattttcaaattagagaatcaattagatttgttgagtatttgtttagctgtggtctctgggtgtctcctgctttatttactctcataattcccccaaagatttgtttctctcttcctgagagaagaatgtgttctgcatatcctatcagaagctgcttgaagggattgagtcagagataaattaagcaaatatttcaaacttgttactatattttcgtgaaccatataagttaatgatccaaggccagatacattgcttaatgccagatacaatcacattacattctgcttttcctggggaagctgaggatggattgcagttcaggtttctctggcccatctcccagggtgatggggatctgcctctgcctcatgccgctttatcttggactgaacacttagtctctaggcaccaattatttcaaagtcacaaattattgtcatggtgccacctcattgcaacccatcagctaatgaggcttcctcactaaggtttgcagatgctcagaaatggcaggcaggctggctggcaggcctcatggaagtgttgtgggccagtggaatgggctcaggtgtcggtggtgttggcagcctcctgtatggtgtggctggctggtatggcccagacggtgtcctgggtagtctctccaggctaccgaggattgaccctaccatcgccatcctagtagttcatcttccttcttttaggttctgatgattctcttttctttgggaaattttcttcaaacattcacttgataaatatttactaagcatcaagtatatgctgagtgtagtgctggcctctgtggacaggagggtgggtgtgtccaagaaggcttcctgggggagcgatgtttgagctgaatcttgaatatgtgagagccagctgaaatgacttaagccccttgcagccctgagtagtctgtattagtgttattctcacttgatggagaaggacatgaatctcagagagggtaagtgacttgctcaaggtcaagagctagtaagtgaacttaggaagtttctcttcagagctcccatgctcaaccactgttctttagcagaggacagacaggtaaagtccacaatttgacccagtgttggcaaggaaaaggagacagttgtgaggagcgagaggacaatgaataaacctgacatccagggctgcctctatgagaggagaggagcttatggtgaagagaaggacagacttgatctctgtccttaagatttttaaggagtttatgatccagttaggaaggtaaagctggaaagctctgtttgatagaaataaaaactacgatcacatgtacagcccagatgttgatctctaggagatgacagcaagcggtccatcaccactggcatccacacatacccagtcctcaaacatcgaggaggagtgtgcgtggctccactcacttcttggaccagcccttgctaggtgggatgccattgctgttctagagggtcatccatggagctccctgcatcccacttctggatgagttctttggtaaggctctgactctttggcctgacatcatggtgggatcatggagcagggtgttgagcttttggaccaagaatctggaagtctcagttctgatcctgcctcaattgctcacttactgagtgaccttgggcaacttgctcaacatctctgggccctgtttcaagtaataccacaaggtacacaggtgttgatggttgcaaaagtttttttaagcattcaaagtataaacgcgtaaggctctttggagagcgagttcttagtgttatattttttaagggggatagatggcccctgagacaccctctcttgggtggcagtgaattggttcagccacatgtcaaggccagataagtcactcaatgcacatgagattaataagtatactactttggacaactacttaatgtatctgggttttttctcctggctataaaatgaggaggctgagttttacctcatagggttattaggaaaattaagtgagacagtgcataaatggcttctgaaacagagtagataaccagagaatgttcattgccttcccctaatcacaacctagatgtgtgctcataggtagctgcaggtgcagcaggtgcactaggcaggcgtctccagtctcatacctaatccagtgcttcctagatttgtgggtaccacagtcctgattcctgccacattatcagacaccggaattaatgtagaaatatttaaaaaatcaattcctctttacccctaacttagttttaaaggataatccatttgaagccacaggtttaatacaccttcatgtaaattacttaaataaaaatatatgtatattttccaaaatccttagttgtatcatactttgaaaaacactgtgctagtcaaatgcctttgagctacttgtcatgcttgctggtggtgttttctatgttacttctcgttaagaaatactcaaggaattttggagataggttagtggagggaattttttatcccaggaaatttgaggaacagaactggctgaatttcagtgaggaaccccaaatccagtttggtgtctgggttctgaggcttaaaatctccatctgtctctagatagtggaacccaagagcctcaactgaggcagtccttcaaaaagctgcaaaatattgagtaatgttattggctgcaaggaaacgtaacttatgttggagagagattcagagttacgaatgggtgccattagtaggcagttgtagcctttctatttgtattgggggggattgggatctttctgggaggaaactaagtgaatgaccttggttagctattcccatctaggcttttctcagagggtaagtgcacatgcaggatagaatcccacccaggataaacagcatgctttggattggcccgctgagcttacctcctcacctctcaagaatacagctccacgccttgcaggaactgacttgtatctcttccaagctgcattgcaggaacattatttctgctccatcaaccacctcacctcaccatagccctgccttctcctttattccagggcacacataatgtagcagctgcctgcagtttggctggtagctgggtgattatgttagttattaaacacagtcagttgggaatgagtcaccaggtatcaagtgccagatctggtgtggatgagatgtggggaagattcacaggcctgataaaatgtcctcctgtttaccactttgctccctgatggagaccagctcatcccagaccagtgaaaatgtgtcctgtttgtcaagactgcacttttattcccttctgaagagaaatgtggttttaattccaaagatcaggtgggatggcttgtgttcgtatggctgataaatcattttaaagaaaattactttggcacacctgacatttgtatgaattcctgatgaattagaggaatgtatccagatcacgtcagaaattttttacccttacaaaacattgtggtctgcgggcaacaaaatccagtaaagctacaaagctgaccatccttccaagctgcagaaatgcagtgttctgggaccatgtcattggtgtacacatgccacatgctgggcagcctacaaggaagagaagaccccagggtagaaatgaggaggtctgggtttggccccaggtctgcccattggccaccatgcaccaatgggcagaagtaacttggtcttgctggacctcagctttgctgagttatggactccaattctgatcaaagctttaccctttccctgagtaacattgtacatatccaaaaagtatttttcacacagttccaggacttgatggaccctgtgaagtccatccatgggtcttgggttaaggacccccagatttaatgagccttacagactcactctgctctggagactatcttaaaaccctattacactttataacacttctcccatggaagaaacaagagctggctcttggagctggctttctcattcttgtggtctctgcctcctggttcagctcagggaatatttattgagcacttattgcatgtaaggctctggttcagatgggagagttgcaaagatgaatgagattcatacccagcctttaaagggtatagcctgtgggaggcttcacatgtggtcaccagcactaatgctgatgaaggctataaggcgtggtggcagcaacattggagaaaaggtcaaggtttgagacctgattccagccttgtgatgaattataatgctgtcctttgtgatactaagcaactcactgtgcctcagtttcttcaaatgtacaacaattttaggactttctctgtttcagaattgtcataaaattcagagatgctagtgaattaatttttaaaagttgacattaagtactacgggactgtgtagtgtgtagtgtgtaaaagtcttaataaagagttttacagtctaccggtggagataaagatccaccagtaaactgtacaactcttaatatcaggagtttttatctaaaaaagtaaataagaatgtaagaatgaatgacactaaaaaagtaaataaaaatgcaagaatgaatgacaatgcacaccaaggattcagagaaggaagcattgcctggggtttggctgactgagaaagcctctgcctggaatccaggaaccttcattttgaaggatttattactttactcttattactttattatataagtcatccatgttaactgtagaaaaatagaaaatacttattgaaaaaaaaaccctaaaacataactcatcatttgaacatctggagataaccactttttaccatttggtgtgaaccctctagatctgtggatgcatgcactttcatggacattcattcacttaatagtgtttattatgtgtatacaatgttcctggccttgagttaggcacttaagtttattatggtaaacaaagcagatactgtttcttaagaacattgtcagctaggctgggaaacagcctagcattagttgaacaattattagaaatatgtaattgcagctgtgtcacctcctatgaacataagcacacatacacagttgggaccatgttattgctctgctgtctgtgatcttccctttctaatgtgctgtgaacttttcttgatgtcatttgatgtatataccagctatctgttgcaaatcgaccagccactgaaacacacaacaataagcatttatgtctgtagttagctagggttgactcaccttggctggtctcctggcatgcctgtgcatccactggctgtcagctgatgcaggatggccttggctgggtcaactccatgtgtctcatctcctagaagctagctcaggcatgttctcatggtgatggctgaggcaaaggagcagtagctgaaacactctagtgttttttcaagcttctgcttgtgtcctatctgttgacaagtcacatggatgggctcaatggcagagtgtaagccctctgcaaggtgacatggccaagagtgtacatacaggaaggggtgaagaattgggacccctaatgcaattgatctactgtaatatacatcctcattgcccttcttgcttgctgcacaaaattctatcatgtgtctatagatgcagggggtgggcagaggaattttaagacaaagggtatgtattggaaaagatgtggagaaagcactggatgttggggctgggtctgcccattttctatgagcagaggagagtcacagggcatcatgtgttaggagaaagaggctggactttatcttgtcagtaatgctggatgatacaataagggtagggcctcaaaaagtaaatgtaaaaatgatatttggcacacatttgggtgaatagaggctggagaaagggaaccaagtcactatgtattggaataattcaagtataggcctggggtagaaggaaatggaaaggaagggatggacaaaagcaatcagattaataattgcagctttcattaatggagttcttactgtatgctgggcactatgccaaactcattgtgtttacctgtaatcctcagaacagtactcgtattatccccttttacagataagaaaacagaggcatagcaattaaacagcttgtctaaggtcacacagacacctcatgtctatgctgggtgtgaacccatgcagtcagtctccagagcctgaacccttcactgtaactccagagatcacccctgggagcagcacataccattgagtgagatttgctaagacttggtaattgtcgatggaagaaaagagggacagagataagttatagaaataactgaacattccagtcataggagtcatactttggacagaattaggaaaggtagataaaagtcaagttgtgggctggcgttggggattgtaaagttgctgaggttggatatgcattgggcggttggatgtctatggactgtgggtgcaagcagtggtaaagccgtggacttgggggatctgggaaatataaacagcagggagggctggtaatggagctttgaggccagtgtacacttagaaacagagagttgagccagtgaaggagtgacctgaaaggtaggtggatattgtggatagaattaatttagactaaaggagaagagtttcaagttggaggaatagggtatggtcaagtgtgggaaaagccacaaggaagaaaactgagaagagttctaggatttggcagtgtggaggtcagtgtgaaggtgttggagagggcagtttcagggagctgtggcaatagaaggcaggttgcatagctacctggagggcagtatgtgagtgtcagatttagagcctgcactcagggagattggcagccaagcccaggacctttgttttgggcagcagggctaggggagaaggctgtgctgtagagactgggagctcaagaggaagcagttggagatgatttaggatgcttgagagagaggcctaattgcaggagcagatcccaggggacatgtgaaaaatgcagaccaggaaccagctgaggaggaggaattgaccatggaggggagcggggagagacgtgtggaaggacctggggaggcaccgagtgaatcgggggtttggtggggctgggagaaaaggataagccccattctgtcatggggtagtcaccattgctgtatttgcagttacagcttcttacacaggagccagagggtattctgaaaataaaacgattcttgatctcccttgccctcaggattgaagtctgttctccttaaggtagcctgtattgctgggtgcccttcatgttggggttcctggcgtttccttagcctcatccagccactccctccctcaatattcaccagcacacgtatacttattgcagcactattcacaatagcaaaacttggaaccaacccaaatgtccatcagtgatagactggataaagaaaatgtggcacatatgcataatggaatactatgcagccataaaaaggatgagttcacgtcttttgcagggacatgtataaagctggaaaccatcattctcagcaaactaacacaggaacaaaacaccagacactgcgtgttctcgctcataagtgggaatagaacaatgagaaacgtcagggagggcgacatcacacacccagttctcttggggggttgggggcaaggggagggagggcattaggacaaatacctaatgcatgcagggcttaaaacctacatgacgggttgatgggtgcagcaaaccaccttggcacatgtatacctatgtaacaaacctgcacgttctgcacatgtatcccagaacttaaagtatgtatgtgtgtgtatacatatatttatacacactcccgccagctctgttccatttgccacacccccccaccagctactccctaactgcaggccttggttcagacagttgacctctggcttctttcctgaactcctctggaagtgctggccctgacaccatgccttgctggcagtaggggctcagaacagattttctgaaggcaattgagacaggccatgttaatgtgcagagggaaaccctttttgcctctggtagttgagaacatctatgaaggtggagatttctctggtgtttctctcaatctctttgtatgctcaccaggagaaccactgtgtgtttttcaagcctgagcagctgtcctcagtccccttttctcatattaaaaacggaaatagaacgggcaaagcagacctcacaaggaccttcttcctcaagacaaatagatggtgttcctattaaaatggtaatttcctttatttaaaaaggcagatgtggtcaaattaagctaatctaatttgcaatttttcattaaaaatatatatgagttaggctgggaggctgttcaggtcccaggggtcattgcattagcagccacggaacaaatgtcctttatttgcttatagatacatacggcttccaggcaagcatgatttccccagattgacttctccatgaccttgtttcagaccataggggatttttgactgccaagttgtcttgtattttgccctttttattaaatagaaaatccccaagtacccccaggttgcagagtcccttttagagagaagaggagacaggatttcctttagtagggaacataggacaaagacatgggaatttttatgtcagagcaagaaagaatgtgaagttctgcttgaacctgggtggaggtagagatcctccctcacccacatacatggaccagagtggacaggacactgtgggtggagtaggatggggcgggggtggtatccctgcatgctgaatatgcccttgacagactcacatcacagaattggttaatattgttagtagcctaggattttccccataaaatgccatcaagcatgtctgaaacctgtatgtacccatcagaaccttaaagagacaacacagctaagctgcatggaactcgagatgttgtggccaactggtttttcttccacactccaaccatgagggacttgattcagatctgttcctcagcatcttggagacctggttgtgaacaccagctctgcctcttgcagctttgtggctcttagtctgtgagatgaggatgtcactgtgctgaggacagacctgcaagtgctctgtggaagctcagcacatgatggtagtcaggaacagtggctcttgccatcactaccagctttggattgctcatcacttcatcaagtgttgggaccatgtgtcaaatccacaaagtcaggggtccctcctgcttctggttcacttcagcaatgacatcttgaaccctgatgaaggatgttttgtgcagtgatgcactgtattgtcaaaaacttaatacaaatccgagtagtattagacagtggggattcaaacatttgggatccacaaaggcaggcagtcctcaacagaggacagggcatatcagctcctgaggggacagacaggaccaggacaaggtgttcttggaagcctagaaagctcttggcccttctggtagtcttgtgcaacaccagagcttgtgaggaattggagatgcttctgtgctattttaaagagggttgttatacttggaacttatgtgtcttatttggattatcatttgtaagcctgtgataaaaaccatctcccaggaagtgtgtggcagtgtgctttatttgtacctctctcatcctgtcttgattggtctttggaatgagccttaggtgttttgctgtagttggcctattttcttgcctacctaaattatgccagtttgtgcaaaatgctgtatatgatgacaagtgaatggtctgtggcaaattctctcttctgcagcccttttcttgtcagtgtcacagctgtgagtgttggcaagatccctcagatagattttcttttcctcttaaatgtttgtctaaaattaattttgactgttttgaagaggttgctgagcagttgcggtgttttgcagaacagaatctggagccctggcagaggcgctaaaagcttctagttcggtgtgatgtgtgaatgccacatccagaaactgggtccacatctgtggagagctggaaggtgagagtgtccatccatgctgttgagctgaactggaggggtgcctctggggttggggccctacatgccatcataccatgtggacttcaatgagaggttgaagtccttcaagggcaggagatggtacgggtcatcatagacctgtacactctagacatctggctgcatatcaggaaaaatagagcatagttttgtgaccttgcttttgttatacaatgtcttgtaaattcaacatcatttccccccctccctcccgccacataccccttaccctggagatgccatcagagaacacaagaacttggcacaatttttgaaagagtatctgttttcagtggggtttcttggtctgccatgtgcttatatagtttgcgtgctttcagttagcatctagcacaatgctgttacccaggagatgaaactctcatccactcagtaaatactagttaaatgtgtgtgtgaacagactcttcatatctgttgattggattttgtattataaatatttcctctgtgccatctgacaaattgttttggtataactgttcctatttttccctttaaatgcacttttaattgaccctaggtggacaaggtaggacttagttcaatagcttttatgggaatgggaaacctggattctattctcagcactgtcccttctctctgtgactttttcttatcactgtatggagactgcatcttactcatttgtgtatcctcaaaagcaggggttacaaactgtatatagctcactgccttttatttgttaaatatactttatttttttttttagcagttttaaatttacagcaaaaatgagaggaaagtacagagatttcccatatagcccgtgctgtaacacctacacagcctgagctattatcaacatccctgcaagtcacacattcgttacagttgatgaacctacactgacacatcattatcatccaaagactatagtttacattactacagtcactcttggtgttgtgcattttatgggtttggacatgtgcatactgacatgtatacatcattatattaatagtgtcctacagactagtttcactgccctaaaaatcccctgtgctcatacagtattgtaagcctttgcacactggcttctttcatttagaaatatgcatttgaagttcctccatgtcttttcatggcttgacagctcatttctttttagtgttgaaaaatatcccattgtctggatatatcacagtttatcacctactgaaagatatcttggttgcttccaagttttggcaattatgaataaagctgctgtaaacatccatgtgctggtttttgtgtagatatacattttcaattcctttggaaagataccaaggagaaagcacttgtgctagattgtgtggtgagagtgtgtttacttatataagaaaccaccaaattgtcttccaaagtggctgcaccattttgcagttccaccagcaatgcatgagagttcctatcagcatttggtggtgtcagtgttctggattttggccattctaataggtgtgtatgggatctcattgttgttttatttgtattaaaacaaatttaatgacatgatgtgaagcatcttttcataggcttatttgccacctgtatgtcttctgtaaactgtctgttaaggtctttgacttatttttttaaatcaagttgtctattttcttattgttgagttttaagagttctttatatattttgaattacagtgctttgtcagatatgtcttgcacatatttttcccccagtctgtggcttgtcttttaattttcttgacattgtcttttgtacagcagaaatttttaagtttaatgaggtccagcttatcgattctttctttcatggattctgtctttggtgccatatctaaaaagtcaccatcaaacccaaggccatctagattttctcctgtgttatcttctaggggttttatagttttgtattttacacataggtctgtgatccattttgagttaatttttttaaagggtgtaaagtctgtgattttttctttgcttgtagatgtccaatttttctagcactatttgttgaaaagactaccttttacccatttgcttccctgtcaaagatcagttgactacatctatgtgggtctatttctagttctctattatgtgctgtcttgattatggaaactttataataagtctcaaagttgagtaatgtcagtcctctgactgtgttcttcaatattgcattatctattcagtctttggcctcttcatgtaaactttagaatcagtgtgtcaatatccacaaaataacctgtgggagtttgattaggattgcattaaatctccagatcaagttgggaaatactgacatcttgataatattgagtcttcctatccatgaacatggaatatctctcaatttaattctttgatttctttcatcagagttttgtagttttcctcatatagatcttgtacttttttaagatttatacttgagtatttcatttatttgggtgctaatataaatgatattgtgcttttaatttcaaattccacttgttcactgttggcaaataggaaagcaattgacttttgtatattaaccttgtatcctgccaccttgctgtaattgcttattagccaccacctgcttttgtaaataaaattgcactggagtatggccattctcatttgtttacatgtcgtctgtggcagttttcatgcagaagagttgagtagttgcaacagagaccatatggcccagaaagcctaaaatatttactatctggcccttgacagaaaaagttttctgatccctgctcaagaacattcagaaggcatttagcagatggtaggaacctggcagagtatgtgttcagtgaatgccgtagaatggatgaatgggttggtttattaatctgcaggtggggtgttcactcctaggagatgtggaggaggtaaagttgtgggctcaatctcagcactacctctgaggaccagaagtctgtgcaggagtgtggatggtgatctgacacctctgttggactgtgaggaggagtggctgttggtgttcatttatttagttattagacatttatttaacaaaacaattcccaagcacaataatgaatcattattctagttttggaccatgtactatttgctggttactctttggtgctatgtatgcaaagtctgaagtgtgtttaacattcctacaaagctggtcatattcctgttttacagatggtaatggtgaggcttagacattgattcacacatctgacatcacatcattacaatgcagaagagccagtttccaagcatgggtctatctgatacaggagcccatgatcttgacactgagaccacggacctttatatgtaccacacactcttagtaatacagaggaagtggatatcaacaagcatggttcctgctcttaaggtgattgtgatctagagtggcagtctgaattgcctcaaattctttttggaatgaggtattaggaaggcttcctggagagggaggtgaagattatgactgtgataaaagcaacatgtaatgtttattatttacaatgtgcctgatactgtgcaaagcatgctgcagacattatctcttttaatctaaataactccatgtgattatgtgatagacactgcaggactgaattatgcaccgccccccccatcctacagtagttatggtcaagtcataatccccagtacctgtgaatgtgactttatttagaaagagggtcttcgcagatgtaattaagttggaaattttgagatgatttcatcctaggtttagggtggacactaaatccaatgattagttgtccttaaaagagaaaggaaagggttatttgacacacagagacaaagaggggaaggccatgtgcagttggagggagagattggagttttactgccgcaaccaaggaatgtcaggtgccactagaaactggaagaggtaagaaagaattccctagaaacttcagagggactctgctgggcacattaattgtgagcttctggcctccagggggaaaaaaaaatacatacatatatatatatatatgtatgtatgtatatgtgtgtatatatacatatgcatgcatgcatgtatgtatgtatatgccaccaagtctgtgtgaatttgtgatggcagctgcagaaaacaattattaccttacccagggaagtttcattagttgtccatggtggcatacctggtgagtgctagagctttgaattgaagctagagctttgatagggtagtctactttagactggtagagcagggtttgggttccagatatggtggaacctgattaacaaaatgttttgggcagagtcccactgggcagctctgcttgtcaattctaagtgagcatttgtgcttattcctcagaggccttgttcccgccacaaagggcaagcacccatctgcctcctgtatacagaggcccaggtggaatccccatagggagcttgctgggtcatatgtccatgctgtgctgacagtccttgtgcctggaacagagcccatgtggtttatgccagctggggactcagagggcagccttggaaaatgtggcttggagctggactgggcatttgaggcacaggctgtggacatagcaggaagcagaggcctccatgcttggtctagggggtagggaaaacagtgtgtgccttttgtggtccttgaaagaacagtgaccttggttgggctgatgaggtgggagccagtgctgagttttaccgggagcttcattttaaattgcaaatgattcaggactccccaagggggaaaaagaggtggaatagactccaatgcctgaaagagtgaaagtgtgtcctgagagctgcagctgtggaaagactgtcaatgcaaggatggtctgggcctacagggacctcgcagttaactgtttcttggacttcccccatcaatcatttccatctcaatcagtggctgcatctatttggccaaagcctgtgccactgccctcttcattcttagactgccttggtttatctcactgcagctccatcttaactagctagagggaaggaggaagttaccctgactaggtcaccttgcaaggtcagcctttcacacaggctggctgcattcttgggggtaaggatcattattagcttctaaagtttccccacaaatctgtttccatcccgtcttcatggggaacagacatagttgaaactcagctagccagttagctgctagtgtggttggaaagaccaactcttcaggccagcagtagatactaagggctgggtaggtcaggatgtggggaggggaagggcaaatggagctgccatttgttgagccctgccaagtaccaggcagtatgctaagactttaagatttttttttccctgattttcttaaacttaagtatcacagcagctctttgagataaattttcctgtctccattttataggtaggaaaaagggtttgagggcttaactcttaagtgactaatctaaggactcacagtaaatgacagtgatgggatttgaacctggagtctttctgactccaaaggccacgcccttacctactacttctgaggcacgaggtacagaccaggcagggccctcagggggctgcttggtgctggctcttctacgtggagattgtggaaagggactggaaaaacaaaaaggccattttttacttatttcatcattttaaccagtcctggcccagcaactaatcaaatttctgagaacttgtcacatcacaggctttctttttaaggtgaatatgtttaagctgggtaatgttgtatgctctgtcctcctgggcatgtgatatgttttggatttgtgtcccctccgaaatctcatgtcaaattggaagaggagcctggtcagaggtgattggcttatgggggtggatttcccccatgctgttctcatgatagtgaatgagttctcataagatctgatagtttaaaagtgtgtggcacttccccccttactctgtctctcctgctaccatgtgaagaaggtccttgcttccccttcaccttctgccatgattgtaagtttcctgaggcctcccagtcatgcttcctgttaagcctatagaactgtgagtcaattagacctcttttcttcattaattacctagtctcaggtagttctttatatcagtgtgaaaatggactaatacataaaattggtaccaggagagtggggcactgctataaagatacctgaaaatgtggaagcatctttgtaactgggtaacaggcagaggttggaagagtttggagagctcagaagaagacagaaagatgtgggaaagtttggaacttcctagagacttgttgaatggctttgcccaaaatgcaaatagtgatatggacagtgatgtccaggctgagatggtctcagatggagatgaggaacctactgggaactggagcaaaggtcattcttgctatgctttagcaaagagactggtggcattttgcccctaccctagagatctgtggaactcaagagagatgatttagagtatctggaagaggaaatttctaagcagcaaagcattcaagatgtgacctggttgtttctaaatgtatatgctcgtatgtgtgaagaaagagattatctgaaactggaactaatatttaaaagggaagcagaacataaaagtttggaaaatttgcaacccagtcatgtggtagaaacaaaaaacccatttttggtggagaaattcaagtctgctgcagaaatttgcataagtaaagaggagctaaatgttaatagccaagacaatgcagaaaatgcctcaaaggcatttcagatacctttgtggcagcctctcccattacaggcccagaggccaaggaggaaaaaatgattttgtgggccaggcccagggcccagctgttctgtgcagccttgggacatggcgccctacatcccagccactccagctctggccatggctaaaagggaccaaggtacagctcagaccattgctccagagggtgcaatccctaagcactggtggcttccatgtggtgttgggcttgtgggtgtgcagaagacaagagttgaggtttgagaaactctgtctagatttcagaggatgtatggacttgcctggatgtttaggcagaagtgtgctgcaggggtggagccctcatggagaacctctactaggggagtacagaggggaaacatagagttgaagcccccacacagaatccccactggggcgctgcctagtggagctatgaaaagagggctaccgtctaccagaccccagaatggtagattcatgaacagcttgcactttgctcctggaaaagtcacaggcactcaatgccagcccatgaaacagccatggggactgtaccctgcagagctgcccaaggccctgggaacccaccctttgaatcagtgtggcctggatgtgagacatggagtcaaaaggagattattttggagctttaagatgtaattactgccctgctcagttttggacttgcgtgaggcctgtaaccacttttttttttggccaatttctcccatttggaatgggagcatttacccaatgcctgtactcccattatatcttggaagtacataacttgtgtgtgattttacaggctcttagtgggagatgatcctttggactttttagttaatgctgaaatgagttaagactgggggactgtttagaagggataattgtattttgcaatgtagcttgggttgtattgcagggctcccaggggagctgaagaggctcaagaaaggacatgagatttggaaggggccagggatggaataatatggtttggatttttgtctctgcccaaatctcatgttgaattgcaggaggggccaggtgggaggtgatcagattgtaggggcgggtttccttcctgccattctcgaattagtgagtaaattctcatgagatctgatggtttaaaagtgtttggcacttccccccttgctctctcctctgccaccatgtgaagatggtttcccttcatcttctgccatgattgttaagtttcctgatgcttcctagtcatgtttcctgttaagcccatggaattgtcagtcaattaaacctcttgtcttcataaatcacccaatctcaggtaattcttcatagcagtgtgaaaatggactgatacagcattcctcttcctaagcaagagactttttcagaagctcacactcatacattagatacacacagatcattttattaccttctgtctcctttatattgcataggaaaatgtacccagaagctattgtggtgactacaccaataaagcaattgcattaatgagttttctgttgcattgcattcatttttagctttggatgttgtctaacctgtcacatcacctttcccccggccgccaccatctctactcctgcctgtgcccttagtgagtccttttggtggcaggcagatatattatgccatagatggagcgtgattcacacacacagcatttgctccaccaagctgtcggtctggagtttattaggtgtgggtcttagggagttgctgtatgaatatcttagagggaaaaaaggagaatgatgaatgcttggaaagctcttccctgacattctaattcttactcactaagtgttaaagtggcaatatttagtttgatgattcagtctgtgcaggggaattggttttagtgctatcaccacgggggctcatgaattaatgcacccctaaggtctgaatgacttgagagatgagtttatttggactttggaaagagaagatagttttaagccccactcaccttacagcttctattgtcacatcaagccctggctggtgactggtgtggtggcactgccaagcatgtcttggctcatcagagcaaaatctcacattcaagtcagatgctgatttcatgtgtgatttatggctgttaagtcaaagacaatagtaaagtttgaaatcattgacttgtcttgtgtgatttttaagtagctcccaaatccctctggtcagcaatggatgttgctcaggagcatttgcagggtgtttaggagtggtggtggtggggtgggggggtgggtattaagagatcttgttacttgagcagtatctttttgaacattaaaccttccttttttgttaaagccacaggatgtctcagaaatgcattcgcatattacccaggacttttttttcttttcggtaaaaataaatctgtatatgtttgatctctcgtgtttgaaggagattaaaatagaatcattatgatgaaactcttttcaaatggttattctgtcttttctgtgatggaaagctagaataagttttcattctggtggcttcaaaacatgatcctgacattattagttccatgcagggccaaggagggggttgcttgggggattgtggggtgggggcagggtggcaagtgctccttggcccacagtagtttacagcatccccccatccctgtagacatgccttggaggttagctggtgatgggagagtgtttaggctcttggagaagagtgtggcttgggttgcactgcagggctcccaggggagatgaagaggctcaagatatagtcttagttgtatgaaaggcaagcctttcaaacagccaaccccgtggagccctgggaagtggctcagggtacagcagtgatttcctacgtctggctccatggctatctccaagcctagcagtttgcctttctggtgcctttttacccctctgatgctgctttcttctctctctctagctactgacacatttcttcaagccccacttcaaactccccacaaggaaactgagttgctgtaagtgatcctgttgctagctagtctatataaaacagcctttgcctcaggcgccaagccctggtctggctagtttaggccaggcatgtttgcctggtaccaagcatgctgacctatggccatggaactctgtccagctgatttgctcaaaaagaaaactgtcagtgtgtagctctttgcatcatcttaggctcctctctggctcaggtggggtttccaacctcattcccatgaagggtctttgggttcattagcgtatctagctcagagactgcagccatccatgtgtgagacaagttaccgccatttagctcaaccttcaaggtggtttttcaatatcaactggcatgtccacagtgtatggagctggagttgttatgcctgtcctacctgtatccccaatgccacttctttcttacctcctactagacctgttctcttcattcttcttctagctgtaaagctgtgagaactcaagcatctgagtctccctcacatagcaattctcatgcagaacaaagctaagaaatggaagggaaggccaggtgcggtggctcatgcctgtaatcccagcactttgggaggccaaggcaggcggatcacctgaggttgggagttcgagaccagcctgaccaacatggagaaaccccatttctactaaaaatacaaaagtagccggatgtggtggtgcatgcctgtaatcccagctactcaggagactgaggcaggagaatcacttgaacccagtaggcggaggttgcggtgagccaacattgcaccattacactccagcctgggctacaagagcaaactgtctcaaaaaaaaaaaaaaaaaaaaaaggaagaagtgattgtattgcatttctgccagctctgtctcctgctttgcatttaggcttgcctgatttcttttagaccttgtctgatttctctttaggacaagaaattccattcaggactgatttgattcatttgttgatcttggaacctgtccattgtagagaatgtcaaggggtttcttctgaacacctggtaagagaatccggaatccttctacagctgatggtcatgcaggagcataagaagtggccccctcccacgatttatctgtcagcttattgaattgcttatgtcttgcattcttccaaaaacttaatttattattccacaagtagtacatgttccttgtagattaaaaaaaataacaggaacaaattgttccttgatacttggggagtaagacatcacacattaaaatatttttctaaagttaaatcaactttaagcataatttgctgagatagacaagaagcccagtatcaggtgttcctcaaggcttcttcccttgagaggaggaatttataagactcaggaggaagaggagatggccagaaggctctgcagcttccagcactgagtgctcctgtctcagtggtacctccctgtctttccccacacaaatttctaccctgtcagagtcctgtgttgcagaggcatcagattctcccaggggaggccccataagctcagtcatcactgccttgcccagtaacctgtgtggggccatttcctgatacagtgcttgaagcgcataccttcatctctcctatttggaagtgctggtacaattaatttgcctcattgggccaacaaactgaagacaaaaaattggaggagggcttatccactgcccgtcggttcctccctcacatttggaaacccacaaataataatgtttactcttttgtggagcaatgagagcccagaccttaggaagttcaaagctggtctttccttcatgagttaggaagcgaagtgccatattgcagcaaaaacagacgaacagaagataccagtaaaattcttaatgtactattttaacatattggtacacaaaaagaaggcacaagtcacccatggtccttccactcatacttaacagctgttaatattttgttgttgaccttctaatctttttttctatgcatctatatagacaaaggttggagacagcttgcagagagtcagtatacagcagtatttaaagaagaaactggcatgaagagaaaaaaaacaagagcctgaaaataagataagtccaggagttacttttcccataaggcttattcttttccctcagctccagaaggggtttttcatgaaaaagaatcttctacaaggagctaaaaagtgaaacctttgtatggtggatataatttcccttttaaaaggcccccctctgcccccatccctggggagctctacggctgaggaccttgtaattgctgaactgcatttcaaatcagagtgcaattgtgatcaaaccaagtgactctcattactcctttgcctcttgcatcaaaaccactcacattgacactgagcaaagcccagcacacttagcctgtgattcttggcaggccggcttcccttttaataggcagggtagcacaagagggcggggcagccggtgctgtctgcaggaggagggtggtaggtggcaagaggtgcttgtgctgctctcttcttggaactagaaagacccagggctctgggttgctttctgggagtgtaactgggcggatcccggggcttttattctaggccctacctgtccccagacctggaaataattagaggcaagcatgcctgcggttgtctactgtgtggtgaaagcctggtgggctgttggcttccttttgtcatgtatgcccattttacttcatgtacttggttgttgagatagccagcaacagttttattgcattcagtgcttttgagtttctcatggtgccttcttaaaaggcctgatgctcctaggcgcagaggaagggagcattcttctaagcccctttgaagtggcaggcgtggactttgttctctgcagacacatcttctgagaatcaagctgtggatctccccagcagggtggactggggtagctggaggtcacgcatagcctgtgcagacttggagcacaaagctcccattagccggttctgttgctcaagtgttttattgttgatgctgaatttctgttttggagttaaaaaaattcttatttttagttttttacaaggaggagacacaattgctctttcttaaatgagtctggccttattcttacctaacagtagaatcctggattaaataatttactgagatatttttgagtttttattttacatttctattgaggtataatacacgtacagaaaaagtgcacagatcttaattttacatctcagtaaatgtttacctctaaatactcatttgtaaccttatcaccttatccagatgaagatataaagcacttccagcacttccaaaggccctctagtgcccttcccagacagtgctcccttcccaagggtaatgacagttctaacttatcaccaactgttcattttgcctgtttttgaatttgatataaagtgaattcatccagtatatattcttctgtatctgccttctttcactcattatgtctatgggattaccatggtgttgtgtctagaagtcgttgtttgtcattgctgtgttttattcctttttgtgagtttattactacagtttatctgttctgttgattggatattttacttcttgttacttcttgacttttttttaaagcttggcttatcaaaaaccatcttttgatgttggccatcgtttattccaatgatttttttaaaaattagcagtggatctttctttttttccaaaggaaatttcatatagagtccattcataggaaacagataaaatgtgaacggctgcaactgagatgggggagagtggcttggagcccccagcctctttgctttctcttatccctataggatggccattaggtgaagcagtttagcttgttggttcagacctggcttctggagttggattgcctgcctgcctaatttctccttgctgtacattcttggaaaaattacttaacctcactttccttatctgtgagatggagattttaaaaaaagaaaaaaaaatccttacattgcagggttctagaaagcattaagaaatgcagtgcaaggaaagcactgcatgctgtgttcccctcagcaagggtgtcataaatggtgtggtgagcgccgctgtcatcactgtagtcagtgtcattttctgcagagccctagcactccctggggcaccatcagaaagccatggattcatggcagtagcagaatcacagccctcactgtccctccagtccgtgaagatgtgacatgccacagcgtgttggagtgcctctgaggccctcctccctgctagtgcaggaacctgtggtcagcaggtgcatcgctcatcatgggaatggcagaaggctgacactctcttgacgagtggaactggacctcctagagctctagttctcatacccatttttcactatgtacctgggcttgttgggattattgagtctgctaaataaagactgcctggggcttcatctttgtgacaggatgtccttgtggcgtgaatccagaaagaggttatgatgtgaagaatggagctactttcaggcttttattctaccctggcttccagccaaattggtcttttggagccaggcccagacccaggcccatgtgttgctggaaggattagttattactattataactgtttgtaataacaataggtgacaattatttagtgcatgcaatctccattagatgtgttatttaatcttcccgacagtcctatgagataggtacagttacatgtgttgatctgcccactgggcatctccccattttaactagaattaaattccatgaggcagagattttcttttcttttcttaactgttgtatccccagaagctaaaacagtgtgggctccataaatgtgtaaaatgaatgaatgattctttctattaaagaagaagaatttggggctcagaccagttaaatgacccacccaacatcacactgctagtaagacgctgagccaggtctgtttgattctgagctcctgctggtaactgtcctcctgtacaagagttggaggggagacccttcctgaaaggatgggatgagagagagggattttaccttgagctcagtgtttatatgtacctgtgataatgagcccagcatgctgccgagtacacatgggatgtgccacctgccgtccaggtggggtcattcaggaccctcacctgcataggtccaggtcttggctgcccccagtctggcagggcagaggacttggcgatggacttccatcttggcccttcaccaggattctgcaggcattgggcagatattcctgtcctggatccttctacagggatgctgcaggggaattggtggggcaggaggtgaaacccacccttgtctgacagaggtcttgaatcagtcctgtgcttagggcaatgatggttcatgcttggggattttcatcttctttttaaactctaggtattctcagtaggaaactccctgttgatcatgttaatcttatggaggcttttcaagccattttgatttttaaatgcacttttactcacagtacagttggtagcaggtaattagcattaggcctgtcttagtatgttttgtgctgctataacagaatacttgagactgggtaatttacaatgaatagaaactcatatggctcaaagttctgaaggttgggaagtccaagatccaggggcctaaatgtggtgagggacttcctgctgcatcatcacatggtggaaggtggaagggcaagagagcatacacagagagaacaagagagggaactcacagcctcaagcctttttagaattggcattaatccattcatgagggtggacacattcaaaccatagcaatgtcatcataccacaaactgtagctgcaaagagttcctctctgctatcatttctacatccttggaggaagaactgaagatttatgagatgagatgcaggcggagagtggccgctcacctccaggctttttttgcctggtgcttgtcctttctttatctccattaagtgtgtgtacccattcccacttaagtatgtattagctcctcttctattccatatttttctgtgcttagcattgtcatcttctggtattttacactggaatccttacctaattgtatctaatctctttaacactctctttaccctttcttggaatttctgacacagtgctagaccattttttgtgtgtgacagttttggaattaccctctgacatcagttgggtgctgttgaaaaagtgcttgtctcctcttagctgtttcttaccctggggtcgtttttagcaagttttagtgatggtgccttgtcaagatattttctttaaaagttacagtgcaggtgtctccttacactttccctcagcatgcaggaaggggtttgcatccaatccttataaggaaagatcaagcttctattgctcagggagggtattggttggcagaatgtggggttcagtggattcagcaaatgagacactgaagagcacagtagttaggagcttggctgtggacacagactgtttgggtccacatgaggaactgatgaagtttcttcctgttttatcattctttagacctacacagtccagtacagtaaccaccaggctcatgtggctactcagcagctgaaactaggctagctcacagtgggacgtgctgggagtataaaacaccaagatttcaatgccttaggatgaaagatcattaatattttaaaatattgatggcatgttgaaatgatagtttggatatgttgggttaaataaaatattagaatgaatgttccctgtttttgctttttagtgtgaccgccagaaattcaaattatatatgtggttcacatttgtggttgacgttatatttctattggatagtgctgatctcacctgaggatagtaacagccccttccttcttcatgggttgctgtgagggttaaatgggtgaatagatgaatggtgtttagtttggtactcggcatatagtaagtatttacaaagcctcagatgatcatcattgacattatcgtcatcatcatcttatcatccagggtggaaacctaagctaagaggagaaagttgggggtggagacatctggattgtggtttgaggtaaacttatcaacttcttaggaggttgtttatgatttggggctctctggtgttataagtaatcctcatccccttggctcctcatttgtattggtaatggaaggctgtgtatgcagttcatggtaaatcctgttacctaaagggatggctgctcactgcaaactgctttgtagaatccccagaggcttatttatttaccaagctactttgactcttgcaatggagtgaaaaatcaggttttcatgaagccagttataaatagctaacctttgggaagtgcttaccatatgcctagcactatgctaagtgcttctcatgtatttctttatttaatgctcacagtagccctccaaggcaagtgctggccccaccagtttaagtggagggaagcagaacttagcataagtaacatcttgcagccaggacgtgagggagctgagccttgaatctaggtcagtctgattctcaagttgtggcactattcattctgcctccttagaactcaaaaagtgagtctcttttaatcaggaaaccttatgcagcacactgggtatttcagaatgtctgagacactggagagggtgtaagcctgaaggcataagcccagaaaatggctgagtcctcaggccagggctgaactgggttctggaaccagagtgcagtacatggtggccattgacaggcatggccagctactgtgaccagctgtgagagcagcacagccctggtctcaggctgtccctttgtgtcagacaggcagattttatacgatgcattcatggacctgaggcccattcaccccagaggctttcccaagaccctggagaggcagagatgcttgacaaatgcattaactttgccaacgctgcttaaaggaggcatgtgatataacatttccaaagccacagtgttttcttagagaaatctcagtacagctaaaactctaatgattgcatgtgtcagaaaaggatcttctttttcatttaggcctgatataaatttgctggtgactttaccacattagctaaattccaggaaagatatgtgtcactgggttgggtgtttctgttgccgcaggacattgaatgatgcattctttaatgagcgagtgtcactcattggagcagctgcctttcaaggagcctttctcttgaatagaagaattctatttagtatccagttatttcctctttgaccccctttcagtcaaaatatgcaaggtttattcctcacctcttgacatccaatgcctgttagagccttattagcatttattctcattgatgttcattgcattttaaatctggcagggacgtgattaagaggtggaaaatcaccggactcggtcggcgtgtgactgtctgatcgtggcatgatgaccagctcagcatgtaatcacatctcttgtgttttcagtttcctttcatacccctggagggaaaaagttcaattccgagtcatgctctggctcggcagaggtaggcagcgggtgagaagggtgcagaatcggttggtcctgagtgtgctgagaggcagcctaggtcctaggagacgaattctacctacattcaccctaggcaccatccttgcatcactcgctaccagaataagcgggccagctaggcttattcttataaggaggtgtacctgtgggatcccagtaaatcacggcactcatcctgtggggttggtggttgctatggatagaattgtgttcctccgaagttcctttgttgaagctctgacccccagtgtgatggtatttggagatggggcctttgggaggtgattaggttttgattaggtcatgggggtgtagacttcatgatgggattagtgtccttataagcagagacatcagagaccttgcttcctctctctctcggccatatgagggtacagccaggaggcagccatctgcaagccaggaagagggccttcaccacggaactgaattggccagcaccttgatcttagacttgcagcctctagaactgtgagaagtaaattcctgttgtttaggccactcactctaatgtattttgttacggaaacccgagctaagacagtggtcctagttctagttcacaactttgggaagcttatataagctcccagttagtaagtggcacacccaggtcaatctggggataacagcttgtctccctggcacttctcgacccctgtgtggatattgcctgttggggttttgcttatatatgttctcctcaggaggatctcttacagccctgtcattatttttgggtcccttgcaaagccatgtgtagagtagacattgaatagataacagcacagtgaatgaatgaatatgacagcccgggatggaaaccaaccaaggaaagaggtagatagatggaggaagccacaagtcactcaacttctcctttcactcatgtcttgtgtatgaatttgcataaataaggattcccagagaagtttcctctgctgtccagacacccacccacccatcaaggagcattgcctttgtcatcaggagcagctctgaagggtctcaagctgttctttcccacatgggtccaactcagcctacttgtcagctcaactgacaccaccatggtaggagtccaaacctctgcttccatctgagcaccaggccggatgggaaagaacgagttaaagcctgcaagtatgagtctgttgtacagagcagcatctaggtcattccttcaacacaaaagaaatgaaatacagcttgcctagctgcagcttgctgcacgaaccccgctgctctgtgcagattaataccaggcaggcatgaggccattttaataagatacagcaagattaataagggagcggaccacatgttcctctggaacacacagtcctgtgtgcagtggtgaagggagacacatgggagatgtggaagcagtggggacagggctgtggggaagggagagggaggcacagggccagcagccccagacaaaagccagcccaagacacttcctgggaggaagggccgcataatgacaggggttctaaacctggatccaggataggtttctagcaatctgaagatgccttgaagctgtgtgtgaaatgctgcgtgtgtcccccatgcacactgtcctctagcctagctggctgtatttggggctgcacagggcctttgcatatgccctcctccctacctggatcagcctctcccattgctgcctagttagctcccattctgcctccaggtctcacttgcttgtggaaacctttccagacccccaaagcaggtcacaggtgcccattgttccctctcaggaccctgtgctccctttctgtgtggcatggtccagttgtcattgtaccttaacttgtaaccctcctccccatgtcttttgtccacttgggttattctgcttcactaagtaaactggatttccctggctgttttttcatatgttcatgcctggaaacaactctcccagctctggctcaacatcatctggttcaaaagccataattagctgaccacaatctttgtgactgttaggtacagatgtttgagggggaatgtggttggattaatttgggctagtgagtgtgtcttctaggatcagggttaatctaatggaaactgctttgaagagagggtcatgtgatagtgaaactgccttttgggggcggttggatagtataagtggggtgaggaagcctggtgtggagagcatatgggctgatatttccactgcagtttcctaactagaggtggacctgagccccctttgccctcgccttggctacagccctttttctgcatccaaagcaatagctcctctgactttgggggcagggatgcccattttatgttagcatcccaagaacttggcccagttatcagcaggtagttggtgcctaaatggtgttggttccaacgtgaaagagaagaggcatcaggggatttccaaactgtttagcctgagctgctttgttgggatgtgtggtttatgtgggtcagcattaaagagtgtgggcaaagaaaaacagggagctagaaggggctcaacatgggatagccatggggaatatagatcatgtgtgttggcacttttgctttattcactgcatgcctgctttcaaatttaatgttcctgaggcatgtctcaaattgagttatttatatttttttcattaagttgtaaacttcttacaggaaagtgtcccccaggtgccttgtctggggccttgaacccctggagctgctctagaaatactcagtgacttggtttctgtaaacctgaacttcatattcttccgtgcacagtgctcaacagcgctgcttcttgcggcatgttgactgcaggggtgggtgtgactgttcagggatggtaaaggcttacggagagtccagaccagggctcttcttgtcaatcatgcattttgtaccagttgttgccacctggtgattgtcagtgtttcacttcaagtagcaaaggaagggcatcagcttaggcaggaaagccattgatggaggcaaagcagaactataggcactcagttccctgaatccagggcttatctaaagcaagtgtaatccagatacttcacgtactttaagatatgtgaacatgtgaattgacaaaacaaaaacactggaatcactgccatttgactcagttgtcacagtgcactctgtctcctcatctctggctcagcaattgaagcagtctaaggccttgtatttaaaaattgcaaccatagttgtttgttattcttctcagttacttggtctgatacttttcttgttttgctgacaactggtccacacttagctggagcatccatcccctgttctctttctctcaccttctcttagagccacatgcttttccctctggttctgactttcacaaggccggtgagagactcccttgccgcatctgttttgactaaactcctacttaatcacttatatcttggcaggactcaaagcccttcccattcgaagcagctaagctattctgacaagcagttggttagtgttaaatggcattaactcacttcacctgaatgtagtcctacaccatagtgggtggggtggggcaggactccagctttgacctcctaggcaagtttggtggaaggatttagggcacagatattggagtccaacaggcccctgctcccagcctgctctgtcactttttggtggggtggtcacaggcaagtttgtcttttcttgtcggaaaaatgaagataacacttgcctcctagggtttttgtggggattaaacaagatcttctatctttacattagttagcacaatgcctggtactgagtgttcagtaaatggtagctatttttggtattattgtctattttatagattttgataagacagctccaaattttctattttgaaaacatcaaaattgtcttgtttcctatgtgacatcctggatcttaataaggttgaacagtgctgtcttattcttggagcactgggggagtattcttggagaagattcagtgaaattcttgactaaagtgcaaaaatcccagatttttgtctgtttcctgctcactgaacttcagggcaaagagctcttctgggaacctgtcccctgtccctgcctcccatggcactggttgggagtccatgccatgctcagagcttttgctgcacccttttgggcaattcatgaggatttgcttttttccagtgctgccagaagttttggtactgtacttttgtgcgtcgttgtgtgtaagcggtactacagaatatttaataaggtcaaacataatacatgtttgaaaactgtgtaagttgagttacaaaaacagctttgattgcatgagtaatatttaaagtgcctgttaaaaatatagtaacttttctatcaataatagaaaaccttctgagctctgaagagatttttaaagcaagatccagtggctcttgcccgtcttggtgaaagttttccattaaacagatgattcatattacgagagtggaatgattaacatgaattatggggaaattattctaagacttgagtgtctgatttatgaatggattaggaggcagattgcttcacaattgttttttcaaaagggagaattttagctgactaaccaagaccctccaaagagagggtttgccccagcattggtgttccttttaggggcaatttctcagagtcctctatttaaagagagaaacttacttctagggaagagaggctacctgcttctgtcagttctggagtagactctagaattcctcccaaacctgactcaattagaaaggcttgagaaagccagaactgccccttggaaggtgaacctttgaatcctgggcatgtgccagacagctgggaagaaaccaacttaattcaagttggtcagagattcccgtgtggatggacagaatggctggggctctcctcacttgtttactggccacagcactgctttcaggaaggtcttagtggagatccctggactgagaactgcagcctgggaggagaggggatgactgagcaggggagcagctgtggaaagctgggtgttctgcagatgcatcccacaagcttgggttggtatcctcaccagaagtatgacctgaggccctattgtgtgccagcacctatgctgggcacttggacatgaatcctccctgtgaggagctcacattccatctgggacaacaaatgaggagatgacagtgtcctgcagtgagtatgaaggagcagtttgcatgcaactaagtcacctgatcctaatagcacctctttgagggaggcactattattagccccattttacaaatgaggaacctttaggccacatggtaataagtgacagagcctcagctaggacacagctttggctaattccaagtcttggctcttaaatcctgctctatccttggtataaaatgatagctaatgctgtggtgttgtaagcagtgagtattgggcactgtcccacaatataggctcgggggggcaggttcagattttgcccttttcatacagtcccactgtagttgtttgttagggaaatgggcaaattgcccttgtcttaggtggggaagctataggtggaggcaaagcagaactataggtgctcctgtcacctggattcaggtatcaccagggctgtgggaccctcatgcaaaaagctctttgttctgcagccttgtgcttatctaccccatccaaaggctgtgtaaaaatgactccatttttctttggctttgtgcagattcttctatcaggtcacttagctttccactggcagataaatcactcgtaatttgagtgttaagccccatggtgcctggcacatgacagctgcaaaaaacgtcaccccgctccccaacatcattgcctctagctttgaggttgatgaagcagccacaggtgggcagatggtgcttaggtattagggaaaactgcttgcaaatctcggtatttaacctctgtccttctccagtgaggcagcctcagtcagaaaggcctgtgaaggggcaggctgggtattcactcccccatgtgatggaggttaataagatcagagtttatttagaatcagaagcaggagatgagcttctagggggaaatgagcagcagggctgggctgggctggggcaggtgcagggccctgggatctcaggctgtttatgtagagatgggtaaacagaagatgcacctgaacctcactgctcacttttactgccatccaccctgcttcctgcagagaagggcctaccaggcccattctgagcatggatttgtgcatctcaagcctgtccccagtgactggcttgcccaggctggttctgcaggacacctgcaccttgcttccagtgctagacttctttaattgggaggttctttgcaaagtaagtcctattttcctttcactgaagttatttcaaaaagtctccatttctatttatccccctgtatttattttgcacctggtatctgcctcgtgctgaggatatgatgatggataagacaaatctagtccccgtcctccaaccctacattgtctcctgacagctctaggacagtaaggattcttaacttttgtatacaggtgaggtagctgaagcttttagagcaggttggtcatttacccaaggtgatgcagagctgtgattccagtccaggtctgtcttcaggttctatgcccttaaccatcaagctgaactgtgactcagtacagtaaatttctggtagagcttctcaggctgcagtttgtttcttggcctccgcactccggacttatggatgtgtaagccaatatttacaagttctgagtggggtcacttcttagcagtgtcttgtgtagagcataaaatccttttgtaaagaaatgaggtgcatttaatgcatgtctgtggtgtgagtttttggtatccctggacctattttattctgttggggacatacttgtattggggagggagagctaggtaggtacttacagggcagatgcccatctcaaattatgaactttggaaggcaaggtctggatcttattcatccttgatctcccatactcagcctgatactggcacaaagatgtgctccgtacgtgttcatgtggtgaaggaggattgattactgtcatgagggcctctgaggctgaataacctcatgaaaaagtgtgtcccctttggagtcaaactaacctagggttgagttgagccttgccaccttttgacagtatagcctggcaagtgatttaatcttcctgagtctcagtttccccacttgagggttgtgggaattaaattagtgctaagtcaggagcttagtacaatgcctgcccatgttaagccacgggttgcaaactgtggccctcaggccaaatctgccctgtctgtctgtttttatagaggtttatttgaaggcaaccatgctcattctttcatgtattatctatagctgtctttgcactacaatggcagagttgaggagaggtcatatggctcacaaagtggagaatatttactacctggccctttacattaaaagtttgctggccgggcgcggtggctcatgcctataatctcagcgctttgggaggctgaggtgggtggattgcaaggtcaggagatcgagaccatcctggctaacatggtgaaaccctgtctctactaaaaaaaaagaaattagccgggcgtggtggcgggcgcctgtagttccagctacttgggaggctgaggcaggagaatggtgtgaacctgggaggaggagcttgccgtgagtggagatcatgccactgcactccagcctgggcaacagagcgagactctgtctcaaaaaaaaaaaaaaaaaggttgctgacgtctgtgttaagtccttaataaatggtaaactgcagtggttattacaattattgtcattatctataatttcaccaccccccttctaacccttaaataagtcacttttaaagcagtgaccttcttctgtacttttgagttttgggaggaacttctcaatgcttgatgaacatgtttgtgcttctcttggttttggtcttgatggctctgaagatttgggtggaattccttcccagcctttttcttctggtctcttgatccctcgtagttttggatctgtcctcaaaaggtggcatttcttccacctccatctctgaacagctcgccttactgagtggctggggctgagaggaacacttaagggggaagctcgctgtaaaatcattgtgtttgagggtccctcatgcttctgggaaattgggagaggcaggagctcctaaactctgggaacatgaactcacccagagtcttgacttctttcccgagtctctctgccctgtttttataggtgaaaacctcctaaaatgtgaggacaagtttttttctcagtaatttgctttttaaaaatgtaatcttatttctgaatcataaatgtaatatacgcaatttgtggaaacatgggaaatgaagacaacggcaacaagtcatccaaatcttaccacccagatgaccactattagcattttttagcatatttccttccagattcctaatcgtgtgtaaatgtttacataattgaaatcacattgtttaaataattttatttcctgcatttttacttatgccataaagcatttcctctagtgtctgatattctttaaaaccataatttttatctatgcacgtacacatgcttccacccacccatgcatccactcactcaacagatatttccttagtgcctcttatatcccagaccctgttaggtgactctgatacagtggtgagtaaattagaccttatctctcccattacagagctcacagtctagtagggcatatagagagataattaatcattataacattgtcatagctcaggctgctataacaaaataccatagactgggtggcttaaacaaaagacacttatttctcacagttctggaggctagaaggttcaaggtcaaggtgctggcagattcagttcttggtgaggcccacttgctgacttgcagatggctaacttctctctgtatcctcacgtagagaagagaggagactctggggtctcttcctcttataaggacacaaatcccttaatggggcagcaccctcatgacctcatctaaacctaattacctcccgaacacttcacctccaaatatcatcacactgggggctagggttctttttcaacatgtgaatttaggagggaacccaaacattcaatccataacagacatcatatgataatgccctaatgggaagtagaggatatgtagaaacatgtacagaagggacccatcaattcacttgaagtgttgagtgaaggcttcccagaggaagccagtcccagtctctgagtcatctctttggaggaagtttgagaaaccctgatctaccagctttctttgggatggtagacagtcttctgagaaatgtgcacctaaatgagatggaaggaaaagaaattagtagttactgtgagtggtggaaccccaaatatcactgtgctgtattattatcaagactatcttcctaaaataaagccctttagaaataaagtgaggcactgcagagatcaaagtgcgcagactcatttggaaatgctggacttattcctgaaataggaggcaatgttccagagagaatcacctccattgacttaagggtgcatcctaggaagggtatatttggaagtactcttgccttttgaaggttcagcagcactgttgtgagatcccggatcctgtctgccttctggcgactttagggatgctcaaggtccatgtgggtccagatgactgttggattaatgtggacaagactgtgtgcctttgtaagatgtgaggtgacacaacattttagcaagggcaaaactcaaaccaacactcttcccaagttctgagcacacaatgcctgccttcttccttttgccttgttacctgtgtgtttgtttttatgtgtttcccatgaggaatgacacagggagagatggctggtgtggcaaactgattgcatgttggatcttgcatgtttatgtttgacagctgacctgggcttagacttgtgcatctgcaacaagagactaatggcaccaattgctcttggtcttaaatcctctctgagtggttgaaatagaagttggccctcttaattacttgggtgatcaggagatggaattggtcagggacacccttgtggggatttagtagtacatttgtcaccacgagggtctctgaagttgcttcaggacaaatctgtggaccacagccatctcccagcagtggataggtaacccacatagatgtgcaagtgatgtagagaaagctccacgctatattatgtccatcctagaggaaaaaaaatccagttcaggaaatgtatctgcctatgtatttcttcttgactttttatctttatccaatttgggcaagcatatacaaatgctgactgcatttgctccttagtatggactgcagtgctttataaaaaagtaaaaatgacttttcattagcaaaggcctgcaagcaaggcagaaactaacacaatttgcatttctttacctttgtaaaatgtgagagttagcactatcctgcagggttggctgttaggattaaattagagagcacatgtgctaacctactgtctgccctgtcgtagatactcaataaatggaagctattatttttattgatataatagctaattttgattcaggattcaacatgctttacatgtgttaactctcttaattgattttgtatgctctggatcaaacatattttggtgtttaatcagagagggaggtgataatgagaatgccttgtatcttgctcaccttcccgtgggcaattgctttcctagtgacgaacagccagagaggggtcttataaccaaatgagagtatcatgcaaatttctagttcaatccctagattgctttctaagatacagtcatattactgtgaaatgatccaaagttttattcttaagagggtcttgtgccccagttagagggagaattcttacttcatatggacatgatgctcaaaagattgctcctaatataggtcttatttcacagactccccagtgggctcgatttatttagactccctttgaggctaactggctgtgatagacaatttttagccttcatcccagaaatgatgccttaagaagctgtgctctgttctatactgcaggctttgtgatgagttcatactttcagtaccatccaaaagtgcctattaaattggagttcagggtacctagagtcttgacttgatcatgtaagtcttgaaattttgtccaggaggcatagaaaaacccttcaaagttttgagtgtttaatctgtttggacagagtcttaggggttagccaaagaatatcaaactctgatataaacagttttcaaaaaccaacagaaaatgtctcttagatgcacagccacctggaacattccaggtttgcaggaaactgctgaagacctgttggataggttcaatttcttgtcatggttggtggaaagatacggctgtctggggagatattacagagggaggaagtttatctcccccttccccttcctcttccccttcccctccaccttcccctcttccttcccccactcctccacctcctcccttctgtctctcctttccctccttccatcctcccctcccctcccctcccctccccttccctccctccctccctcctttctttctttcctccttccttccttccttccttccttccttcctttccgtcatgaaggtaataagagccaaacgtgttgtacagatcaggggtaagagatgccctgggtcaaggctgtgtcctcttctgggagttgggcagtggtgttggatgaacatcacctgttggggatgcttggcaggtatgaaggatggtggagtgattttttggccttgggaaagtgactgatttgttcagtcattgctcagtgatgtgtctcatggacacatagcagccacaaaacacctttactctactcctcctccctaagcaggctagttgcatcacttggtgctttctgacttctgcatagaaaaaccttcaggatttgcagtgactggtacagtcctcaggaaggaaatgggactccagaagtccttgtcagaaggcaaatttctggtctttttttttctcatttgtgtctcagggtgaagtgagcctggcaatgatttcttgattcctaggaagatccataaggtttaaatggaatggtaccttagggtaatgatattttattctgatgaaaggtggattattaacagaaggtaagaagagggaattataagggttccaattattctgctgtgacagaatgagagaagttccatttccttccaacttcacaaagattgtatgagaatcatttgtcacaaatggaaacacactgatctctttaaaggaaatatgtagtctatattcagcttgtcccagcagtacaagctgggttgcatcatgatccttaaagcatttgtgtacactcacctgcttgccgttccccatatgtgcatgtgggtgtaacatgtctgcctggcaactcctactcgttcttatagacccagtcaggcatctctttctctgcgtagccttccctgaccctctccttccacaagcagagctgatcatgagctcctttatattcccactgaccttgaacatgtatttattccacttctcattcccacatcccccaatgcctcaccctgtgcctagaacaaagtgtgcatcagggctaatttgttttgtagtggtttgtttgcatgagcacctacccttctggtctgtgaactccctaacaacagagaacatgttctactcacccctttgtccttagtgcctgaatcataattatagatgttcaattatgattagctgaatggatggagttagcacggtggcctaagaagaggatggactagtgtaagatagcaaactccatgagtggtcctcttgttggattctgttgtaagctctgataccctgttcaggggagtttctatagggaagatggagccatgggagagcagaaaccagttctttgtatagacatgagagaaagggaagggagtctttgctaatggccaggtcagcagtaggccaacttccctttgtgttcctgggagacaggagaagctcctgtaaagaaggtgccctatagctatattaagctggagcttggctctaggatctggggctgggagaggaaacatagtaagtagctggccccctggttggtctgcatactctctctctctctctctctctctctctctctctctctatatatatatatatatatatatatatatatatatatatattattttttttgagacagtcttgctctattgcccagaatggagtgcagtggcatgatctcagctcactgcaacctctgctccatgggttcaagtgattctcgtgcctcagcctcctaagtagctgggattacaggcatgtgccaccatgcttggctattttttgtattttagtagagacaggggttttgccatgttggccaggctggtctcaaactcttggcccccaagtgatacatccacctgggactcccaaagtgctgggattacaagcctgaaccaccgcaccctgcctctaaaatggaggtaaatggtatccatctgcttgggttcctggcaaataaaatgacaacagcaacaaaagagcactctctgcttactaaggtgatgctgggcaaatgcccacttcccttttagatttcccactaagtttcctaaatgtccagatggcaatttgcgggtgaataatttataccaagatctcttatgcattatgcagcacagatttaaattacaaattgacctcacttggcagtcaacttagtaataagtgggctttttggtggtgggcttgataggctaggctggggccgagttagagttaggcaaatggaaatggcatggtcagcctaatccaacctgcactgatgaggcagagcaggtgtaaggaggtcgcagagcttggtgtgctttgactcagttgagcccaccctctgagggtgagctcagggcagggctgttcaggcatctgttattctctcagaagtacataggttccttccaacaggagggtagtggaagtgacggctggaagaactgagcctctccccgagtctgtggcttcccaggaggagcgggttctcctccagcaggatgtgtccaaggtggctgagctaccaggctggagtctgctccactgggcctgcggtgttcagcagctgctgcctgagccttcttgacactgtgagggaggcatgcaggactccacctgggggctgggctatgatctgagccagagaaggagagggggaggcatgagggcaagaaaagctatcagagaagagtggtgtgggggggtgttgtggaaaacatctggaacggctcaggtccttgatgcaaactgagtgaaaaaggtgtggtgggaatgctgagacagtccagcacctctccaggatggtcactgcaaacactcatggtgcccagccccataccaagccctcatcctggattacttcaactccttgtgattgctctttgagatgatactatcctgttctcccatttcagaggtgagaactaaaacttagagtcaggactgggtgtggtggctcattcctgtaatcccagcactttggaaagctgaggtgggaggatcacttgaggccaagtgttcaagaccagcttgggtaacatagtgagaccctgcctctacaaaaaataaattagctgggtgtagtggcacacacctgtagtcccagctactctggaggctgaggcaggaggatcacttgagcccaagagtttgaggttgccatgagccatggtagtgccactgcacttcagcctggatgacaagagtgagaccaaaactcttaaaaacaggccagatacagtggcttacacctgtaatccttgaactttgggaggctgaggtgggtggattgcgagtttaggagttcaagaccagcctgggcaacatggtgaaaccccatctctactaaaatacaaaaaattagccaggcatggtggtgcttgcctgtagtcccgtctactcaggaggctgaggcacgagaatcacttgaacccaggaggcggaggttgcagtgagctgagattgtgccactgcacttcagcctgggagacagagagagagatgccttttcaaaaaacaaaaaaaaacaaaacttagagtgagtcacttacctaaggtgatacagtcaataagtgatacctgaaagcaggtttttcaattaatgaaatattcactcaatacctcctacgggccaatcctttcctgggtgctgggatacagcagggaatgaggaacacagctctgtcctcaggaaggttacattttggtggctgagacacaaaacagtcaacaaacaaagtacctgacacctgcagttgatggccgggcccttgctcctaaactttatgctctgtggattgattagacagtctgttctgcaaatattgatagaaagcctatggtgtgtaaaactgcaccatgagagatgtgcttggaggcagataccctcagtcctgagttcaaggagctcacagttgggggtggcagagagaagtcgagtatgcaggtgacgcaggacagggtgtgtccccagggagggactgaggaggctgcctgggggggtcaagggagggtgcaacgtcatcctggggagtcttggagaagcctcagtgggagccaggtttgaggtgttcttgaggagtggggtgaggaccaatgagggcagggcctcgcaagggcagaaatccacatccactattctgataagatttggctgcattgaaggatgtaagtataggaatgcaggagactaggaagggagaagccaggagcagcgattggtgcttagtgtggcgagggctggggaaccaccactgggtttcccgcagcagtggattaagaaacacctttcgggatgagtgtggggatagcggtagtaagtggaaagatgttggagtcagggagatgtgatttcagagcttctgagggtcagaacgtgagtgaaaatggtggcagtggaaaggaaagggcaaatgtgagagtttcccactttcggcagacatcaggaaattaagctggtgatgccgttgaggagggaagatgtggtgtttagctttgtcatgtggtgctggggaggccagcaagtatctgtagagggagggtatgggtaaggaatggaaacttaggtgttacccttctggaagtggatgggtctgccagggagagactggggacagaaaattgaagaggggacacctcggcttgcccctgctgaacctcccatctaggaaggagttctaggtcatgaatgtgtgctagctgtgttctgagactcttgatttgtttgtatatcactgcagtccctattggtcagagtgtaaagttagtttcctggagggagctggcagcagctacagaatttgaatggactgagtaattagtctctgttgaaggtgccactttaactgatggggaggtctctgttatctgagcagagacatttgtttctgatgtgtaaagataacccatcccgaggtgtgtggtggcaggtgtggggtcagcagaggctttgtgattgggctgtgtgtctgattcatcaagaaggcggcagtgggttcccttagcctgtgtcacaatttatttatatttttatttattgattgattgattgaatcagggttttgctctgtcatccaggctggagtgcagttatgtgatctctgctcactgcagcctcgaattcatgggctaaagccatcctcccacctcagcctcttgagtagttgggactacaggcgtacatcaccgcacccagctaatttttgtatttttttgcagagatggagttttgccatattgcccatgctggtctctaacttttgggctctatcgatccgcccacctcagctttccaaagtgctgagattacaggagtgagccaccacacctggctcctgtgtcacttttaggaaagggttctgaaaggtttttcatctctgtcttctttcagtttgtcagctctgacttgaccagtactgcagtggtacttggtaaatccagaactgcaaagatgatagccatcaaaaggactttgtgtgtttttggaaatatagaaaataattgtatgtgtctgagagagaaaagaatatggagacgggtcactgcagtgtccaccttctgcaaccacacatgaaacatcacccactctttgcctatctttgttttgaactagagaagttatttcactagcatttacaagagatgacaaattctccttagctatagcttatcaaggtctatgactgcatggttctggctgccttttcaggttatttctgacttaaatgcctccttctcctccaccccttcctcttccccacctttcttctccctccactcctccctccttcttcctcgtcttttcctcctcctgcgtctttccaccatggcttcttgctgagctgttatacgagctgtgccaggcactctactagctctgtaacagatgtggtttaatccttccagggaaggacagtcatatgcaaaaaagattgataacaacttggtgaaaaagatagaaaattctttagcaatcatatgtccaagaatgcggcatcctcagcagtcaccgcgttataaccaccttgaggtgaggcacggtgtgccttatttgtttttctgcccccacaatagttgactgtttaaagggcttgctaaatatttaaagagtgattaacagagatgcctttgtgggtgaaatttagttctgtgccttgaggaagaacatctagtctattaaaatatttactggcatggtaataacaatgatagtaactgcagctggttggcggcctgcagtatatcagctcttattctagatatttctctacaattttctcaagccttctaaacaggctggcaagtctggattttactcatgagggggaagagaagttaagacacttgctccaggtcacacagccaatatattgtagagaggattccaaccttatcctgtctgattccagagctggagccctttgagtctctgtccatatccttgcttacagaatggccttaacatcttttagagcctccagaaaagtagcttctcatgtaggttctccactgtgccatctagagcaaggctgatgagaggctgagctgggattcatgctcctacatgcccatcctttaattttagtttacatgggccctactcccatcatgattatgtggctattctgatctatatgacaacattatgtgtcctttttgtgttttaaagggtgctatcttaaaggatgcatgaaaggtggtgacatttgaaatgtttagttaccatatgattgtggcaatgtactgcccttggatgtggccaaaacatacaactatcttggctacaaatttacagcactggatgtcaggcccctttgcaagatggctggtgggctgtgaaacagaactgggagggcctggagagtaaaatctaggcgttttctcccactctgggaatggagaatgcaatactccttgggttctgtctcaccttccattcccctccttgtcaggaggagatggacaacaagcggattgtggttttcaggaggacccttggaatcagcagaatgatgagaatatctcctttagagggtgcttcccgctaatcagctgtagatgatacaaccacctagcaagaagagggcattttgtttccatttcatcaacgaggagcctgagtggccaagcactttgggcagctgcacacagccagtgagtggcattgtcagcggatgtgcctgagctctttctaaaggaccatctgctctggtgggaggtggggatccagtgcagaaggtctacctttccaacccagcatgctgcttctctgatgctcttttcttcgtccagattcttctggctgttgggctatctcaagtgcttatggtccttggtgggtcaggattgtttttataactgttctctgaaacagatgtggaatttgccgaacctgccactgagccctagttggacattgtgactacctacattccgctgagtcatgtagaatcatgaatgaaatatgtccttcatgtgaaacacatgggaagcatgtatgttgataaaatagaaactcatgtcccttgaaaactgatcagacttgatcttagcatagtagtacttccatgcccactttgatgctacattacacacacacgcacacgtgcgtggacacacacacacacacacacacaaccctatatgattccttcctgctttttgaagaagggctcccacactttcattttgtgttaggccccacaaattcatcttgcagctgaggattgcttccactgaaaacaagaggatgaggaatcatgaactagaaagagtcctgccctcagccctgcccttgagaccaacaagcaggagaagccatgtgtgtgcactcttttggatgattgcagctgagtccagccttctagacatttcccctgcactcactcctacaggtgccagacatgggagtgaagcagtgttgtaccctccagatgagttcatccctctcccagatgaacctcctccaagctacctcagttgacgccacgtggtgcagaagccttgctcagccaagccttgccacagaattgtgagagataataagtggcagttgttgtaagtcactaaattttggggtagttagttacacagtaatagataactgggacagtgtaattagaccagtgatgtttcccttcagaccttcttttcccttggcttcactgagattgccctcctgggttttctccacctcattggcagctcctcttctcagctctccttctgtccatagcactgtaacttctctggggggcagtctcattcctgtctgtggcttcagcaatgccatccacaccagcacctgactctcaagcatctgtttctgtttgaactgctagaggaacatgtctcttagctctatatctcttgggcaaatttttcttctgatcttagcacccaggcattcatagatagctcactctcaacatgctgagaatggggcttaacatcccccttccctccacgctatggcttgaattgtatcctcccaaaaagagatgttgaagtcctcatccccagtacctcagaatttggaaatagagtctttagagaggtaatcaggttactctgaggtcattagggtgggcccttaatccagtacgactggtgtccttatgaaaaggggaaatttggacacagagacagacatgcagagagagaagagtgtgaagacacagagagaacaccatgtgaagatgaaggcagagatcaaggtgatgcatctacaagtcaaggaatgccaaagatgagcaaaccactagaagccaggagagtggcatggaacagattctccctcctggcctcagaacgaaccagccctgccaacctccatcttgggcttctagctttcaaatctgtgagacaataatttctgtgctaagccactcagtttttggtcatttgtgtgactactctaggaaacaaagatattcccctataccatctatgctgtaagcttgatcttccgcctctagtcctggtctcagcaagtcattccccaatttctccacttgatcaagctggaaacctgaatcttcagtcccaagaattgggctggcttgaagttaggaactcaataatattgactatttaaatagatgctttcaaatattgcaggtcttttggcaattatagttactaccctgaggatatgcagaattggaattaaagagagatgcaaaccccaaacatcttttatatccatcccatccctctgtacttgaggtttcctgagagaaactattgatttgttcttgcagccatggggaaggcatctattgagagccacatgtatgtaaataaggactcagcagcttgcctgcctttcaattcttcagagaactatcgatcttgagttgggagagttacctaaaagttctcttttgaccagtttctccaacattgtgtaagagcagcaccagtgtgttgagtcaaacaatgtgatctttgtaaccaatctcggaggtttggctgagcttgttggacggcttagggcaaggagggcagtgttagagctgtattgatctgcagtgggttattgaagttgttgcaaatgcttacctctatttttcccattcagtgatattgaaatcaccagtttgcagaattaagagtcaggtttccaaagagatgttgtgctatttttctctagacagtgatttgaacaagtccgtgtgctccatcctttcagagcctctggactacccttggcaacacaggagcaatgtaattgttgcagttttattttatattataactacttcaacatatttctgatacttggtctatgcacattgttttttttttgcaaataaattatagttgtatgttgaagccctgagcagggcacaaagacatcaaagtcagctataatcataaaaagcacatgcaaatctttcacattaataactcacagttaagcacaggcgctatgcccctgccgcacccccacccccacccctctgggattgcagcaagtagcaatttgtttagctttggtaaagggtacaaaatcaccaagttcagatgttccattttggtcatgcacttgctgtatggatttgatttaggccaataatcaactttataaatggataaatatttgtcagtcaggtctgatttgtaagggatggtgctgattttgcagacattgtcattgttattatcccctgtggccctgatgaaactattacttgaaccccatattactgaatgtccacctctaacctgtttaccttcttcatttgttcattctatacgaacttacttagtgccaacatgtaccaggcttgggcttggtgctagggatactcggtgaacaagacaaacttggccctgctgtctctgggcagcaaagtccagtctgtgtacaccaggtgtggcccacagcccagcagcagcagcatcacctgagagctggatagaaacgcagcaagccaggccctgctgctgacctactgaatcagaatgtgcattttaacaagatggccaggtgattcctattcctatacaagaggacatacatattcaacaggttattcaaatatagtgtgaaaatgctcaggaagggcacgtgtagggcattctaagaggagccatcacgttacgcctgtgccagaggaggcgtggctctgggtgctctggggaggcttcgaagcaagagactggtttttttttgtttgtttgtttgatttgttttttgttttttgttttgagatggagtcttgccctgttgcccagactggagtgcagcagtgccatcttggctcactgcaaccttcacctcctaggttctaagtgatcctcttgcctcagcctcccaagtagctaacaggcccgtgccaccacacccggctaattttttgtatttttagtggagatggggtttcaccatgttggccaggctggtcttgaactcctgacctcaggtgatctgcctcccaaagtgctgggattacaggcatgagccaccatgtccggcctaagaggctgttttagttgatactggaaggacaaagaagcatgaaccaggtggagactggtggttgtgtgagatctcacattccaggcagtgtgcttaaactctgacgcgtgagaaattacaccctgttagaggaattacaatctttgagctcagagcactgggggcaacatgggcggcagagaggggcttcaggtcccaaaacaagaagtttgaactttccccaggtggtcacaaggagccactgaggcatttaaacattatttgatttgaaaacatgattggattgaagaaaaatcacttcagctacgatgtgggtgatggcttggtgcaagggagggtggagggctacccaggatacagaggacaggcctggaccaaggtaatgacgctgcaggggaggtaagtggtgcctttgagacatgtttaggaggcagaactggaaggaccctggaggtaacagagaagggagaggcccattaggaggtgccgttggctggtatcctgcaggaggtctgagtaactttttctgactctcacattctggagtctgccccactaggcatacaccatgtagatttggggtatttctcagttcccttctttatcagatcatcagttttttgaagacagggctcacgtattgcacgtttttgtttgacttaaagtgtctaacactgggcctggcacacagtgctatcaggagttgtctttctgagctgcaaactcctttttgggagaacgttggtagaaggaggcaagcctcggaggagaattgtctggaaaaccatgtttccctgtttgtttcttttaaatttgaatgtacctcctgtttatatggcgctttacagttcaggcatcattttcgtaactgccacctcatttgcattcctcctgttcaccctctgtgcagctttagaaaaggctgtgcattcacagctcaatgttaatcaagggctgattatctcggtctttttctcctccctgttctgacttcctgccttttgacttgggagttatagctggaagcaggttggggtcagacaatgcagagttgagtcaaataaatcctatccatttaaattagccattcaggataaaggatgggtggaggaggggtgcagggaaggagggggagcaaactcctgttctgtgaccccagcttccaggtgcccagctcatgagggcaggaggggcccacaaggaaatgcaacttcccggtcttcctgggcttctcattctttggggtctattctgttgtgtgctgggagaggaagccaaagggcatctgatgcaggagaaaggagagttgaggccttaacagaattgcctcttgagagggagcctgtgcaaaggaagacaggggctttgggtgggacagacctgagtttgaaccctgactcagctactcagccccatggccttgggcagctgcttcgcttttccgaatctattttgtctgataagatggcagtgatgagccctgtcacacaggtgtctgaggcccagatgaggcagagatcagtgctctttggtgcctgcagtgtctgctggagtgcctgcagtaatgctgagacatgtgtgtctatctggtagccttctcttccctgcctttttagagatgaggcttccttaagatctgggagggcatcatgctgtaagtaatttctatatagagtgttaggggcctcaaccttaatgtgtaaaatactcaacctgcagtttgttacacattcctgggctcagcccctagagagagtgattggtctggaatggctcccagttgattttttatagggaccacattttgggaaagttttggaatagagccagagctaaagagccacttagaccagggtgtttgctaaaaatacagatggtcagccctgctccagaacaactgtgtgggactcttcagagggaaagcctgtattttgaccaagccctaggtgattcttggatagagcaaatttggttaacactgaagtatggaatccaggtaatgcccatctctgcaggaggagtatttactgcaagaggtgcaagcagctggggatatgtttcagaggcagacacaggctcaccccataaacaggaagagctcatcagggaagggattctgaagtgctcactattgggactgagtgggcacagcattgcaaggtctcaaattctagaaactggtcgtttaaaggcagtcatattctttgctaaaatgaggctatgggactggatgactttagtccttccagctctgaaatcacttggctccaaacaattccatacaagttacattaggcagagatgaatatttgttagaagggtgcccctaacgtctggtgtttgcattctttttaaatattgatctatattgtgtgagtttattcactttctatatttagtccatgtttctacttacctgtgattgtattttcgtggagaagtagagcgtgtgtggttctttgagactctgcctaagaaccttctataaagcttttgttacccaagctaacagcactgctgcctggtggtagcttttggaattgcaagcccatcattttggaaatacaggaaacacttgcatcaaaatcccttggggaatggggaacagtctttgtttttttaaaaaatggcaaattcccatttcagaccaactgaaacaatctctgtcggtagaatccagaaacctgcgtttatactaaatactttatgtgaaaccttatgcccaatgttgtttaaaaccattgcttgacagcagggtttctcaaccttggtagtattggcttttggactggaaaattccctgttgcaggcagttgtcctgcacagtataggttggttaacagcatccctgacctctacccactaaatgtcagtggcaccgccccctccccatttgtgaacatcagaattatctccagacattggcaaatgtcccctagggggcaaaatcacttttgcttaagaactgctgccctgaggtgtgctgtgaacatctagcccacttcaatgacagcaagtgccacagggtcactaaaagttaagatgtgacacctgtcttcacagaaggttattcacgcaaatgtgaaatgacttcggacttgtaagtagaataaaacgttctggctttatgacctttgttttgatttttaaatagtcatcagggaaagtcatacaggatggactttaattaaggactccccacacttgagcatgggccatgctgtgcctttctcaggcagctattttggctcagactcctggtgcatgggagcctcttgggagggatcaagagagagaagtgtaacttcttttctcccagaatctctttgcgataattaaattctattaggtttttccattgtgggaaggggctgtttattgtgtcaattatatttttgtacagaaaacttattcccaaaaggttatagacaatactcactgtggggaaaagagttcactgggcattcctgtggaccctagcctggttaaatgaaacttgctgatcctgttctatgatggggagctgaagtctcctgtatggcacctggtatgggtttcccagaggtgacctcttggacttaacacttccactggaagtcagttaactgggggaatgtcagtagcccccagcaccttacaggctttctgatattctcatgctgaaacagagtgccccacacaggaatagccaaacaccagggaacatgttgcaggatgaatccttgggtattgtagaagggattgacttcttgttccctaaaagtagagggttgggattgaccctaaggaggaactgtgtgaatatgcttcctgttggatctgggatttcatacaacggggctgagaggctgagcttcacaggtggctgtgatggttgctagagttgaggcagctgagtgggttggaagcagtgaggtgcttgatttctgcaaggctcttccacaggtcctctgtacagccctggggaagcgtctgcccttcttggggcccttcttccactgttgaatgggagtgttgagcttggacatctccagggcactgaaagtggcatcactgtgtggatggaccttgtggggagaagagctggcctatgcacctcttctgctctgggtgagcctagacaagagggtcctcagtagggaaggaaaggaaatgatatatggtttttgacctcagtctaactcattgtcccctcctgaaggtctgcaggtctagctagtctctgcatcagcatgaacactggagaggggacagccaaaccctcccagacctcccctttgtgactgaggcccctgtggcttactctgacacctgtgggagtggataagtgtcgggatgtacttgcacttgattgaaggccttctgctcaaagacagtcacccagcagccttctgatgcctgaaagcctgctttgggaatacagttcttttggtttaacacttgatctggcatcagatcatttatctagcattagtcattacattttggtgtgaatgaggttcagctcatttcctgagatcagatttcactgggaaaggagaatatagatattgtacttctgaaagggtcaggtaagaacaaagagtggaacaaagagccaggaggaacaaaaagggcaccgaacttggagaccagaacagacaaaataagtttctactctccggtgttgccaaagggcaaggttctctgactccttcctcaaccacaggtaattttctgtgaataactgagcatcttccatttcagcctgctcttctcttctagtctgaaactctagccagatttctttattttaaataacctgtgaagaccctcattttcttccaggaacctactgtctctgtcattcaacaccactattgttcacacttctgcctgacattcttctagtggaaatcgactttatttgctcctgaatgggtaggaaagaggtcatggaaattcctcttgagacaacaagtcttaccaccctccacggacacagcagagattggctgggctaccaaatgaattttttatttatattttcaattattcatagtgaccgattccatggggtgagctgaaagaaatgcccaagacaagattttttttttagtgacataaagaataaaatacctttcagatttttaattttattttcttccattgaaagagattcttgttctgaaggaaacctggcagttctgtattggtgcatcagggcaatggcatacctagcaaggagggccaaggtgaggctgggatttcatctccacagtaggtctaactcagacactatcctccgcggaggtgtctttctgaagtgctttctgtggaacaccgtccatcaaaacgctctttgctgagagtatgtctgatcacatacatgtttgcaaggctttgctcatttcctggagttgggcaggcctgtgtacccacacaccgcagccctggcgctctctggcaagtcaccgagcacagtcacatggtaaaggatcagagaagtcctgcagtagagaaaacagtttgccagctttaaaaccactcattctcaggtaatttggctacaaaagctttttgttttcttcccgtgacacattattagaaggaacaagtttttagagatgttgctgtatgaaatgattttctcctgggattagctgttacccacatcgttgtaaacatggagtttttgcaaacctatttgagtgactggcaggggatgctgggaagtgtcgtctctactctcagcaagagggccagggctgtatctgtcctattcaggggtatagcctgagggtctaccacagtgcctgacacacagaagctcagtaaaaactcatggaacaaatgagtgagtaagataatttttgtttaaaatatgtaatcagcctgtaaaactcttagttcacacacgtccttctgtgctagtaggcacaatctcaaaagccaagtgacatatttcattttgcttttattttttgctatcattttttcaaacctgagacatgactgcatccgtgaggcctaagccatcttccttggcagcgtcctgattctctttgtacagtgagacacctgttcgatttgctggattttcttgacacttatgaagagtaaagtctctgggaataggttttgtttattctgagcagatcttaaaatataactacatttatactgtgcctgcaaggcactctgagcaaacatgcacattaggagaggatagaacttgtcttttgtctctgagaccttgccttgcagagcataaagtgtctgccaagcgcgtgcagaacataatgcttgaagttgttcccccttggggagactgtggcctggatggtgcagcgagtacatgaatagagacagtgaagacagcatcacagatgtgcatgttgacttcagagttgtggagtgccagagggatcaggcctatggtcccgtggaggggtgggcagagtatgagggctctgatgtcaggccaggatgtgagtcccagatgctgcagttattagctctaggattttgggcaagtcagacagccactgtgggcctcaatcttcttccttttttttttttttttgagatggaatctcactgtgtcacccaggctggagtgcattagtgtgatctcagctcactgcaacctctgcctcccaagttcaagtgattttcctggctcagccccctgagtaacagggattacagacatacaccaccacgcccagctaatttttgtatttttagtagagacgagtttttgccatgttggccaggctggtcttgaactcctgacctcaagtgatccacccacctcggcctcccaaagtgctgggattacaggcgtgagccaccgtgcctagctttagccttcttacaagtaaaactgaagtaagatctactgcatccctgacttcctcacttaattcttacaacctggtgaggggtactacagttattcttatttcacaggtgcagaactgaaggctcagataggtaaaatgtcttgttttaggtcatagttaggaagtggcagggtgggtcaggaatccagccagccctggatgttctgaagcctcagagtgtggcactaattattatccagcattctctctcagtgaagacctgtttattggggagttccaggaaggggtcagaaggaagggctcagtagaaaagttcaggcggccagtgtcaggtaatgatgcattgcacctgtgcagtggaagagggcgtgtcatccaactgttccagttcccctttcttgaaacaaaccgggatcaagatctccttcagtgatgacagctggagactgaaaggcccctaactgtctaccttttctggtgtgtgttttaatcaagtgttttttttttctttgaaatagtaaagtagaatttatgaggcacttccacagcgtgctctagagaacatggcccttgtaaatatcacattcccacctacctggaaggatgagaagactaggaagtcagaagctggcatgtgcaggagcacacatcacacctgagctggaccccgtgggcagacctcaggctctcaggcttagagggtgctgtccccaggttagcagcactcatcccaggggcttccaatttgctttcaggcccagccacttcttcagagcatcttttctatagtctacagtgaatcagggctcctggcttagaagtagaatcatggttcaccaagcattatctgggtgtctctgcttgctcccccaaaacctctcatcagccatgaacacccttgctatgtgtacccgtctggactcttccagtgtaatgagacagaatactgattgaaaaaaaactgattgaaaaaaaaaggagctttaagacactaccaagaactcaagagatagttctggttttaggtttagcttgatgcggaggctcataaatgccattggaagctgggttcccccttcccatctctgagctctgttctctgtgcattaggtctgttcttgggcaggctgtcctcatggggtgagctggctgcagcagggccagtcttaaaggcctttatatatacatttagtagaaaatgtctttcggccattctggcaagtatctcattacatttccctgtccaaggaaaatgtgcccatccatggaccaatcaccttggccaggaaaatgcagtgcattagttgacttaggtttgggtcacatgctccatcctggaactggggtagagtcacaaagccagggactaaatgtaggggacagctggtttcccaaaggaacctatagaaagggagatggatgctggtggctgtgatataaaacttgttacttcccttagatctctttggtcctctggtcactggctgtatgctggggttatgtgtgctgtgtggggagaatctggtgtacacttctgactatattacaaagcagacaggtatgtgtgccctggccatgtgctaatgctgatgtgacaacttaagtcagtggcaatattatagttaccattcattgagtccctcccacatgtcaggcattgacagtccctttgatgcacattccttgacttaatctttgaaataacagtacagttcattagaaaaaaacaaacaaccccatcaaaaagtgggcgaaggatatgaacagacacttctcaaaagaagacatttatgcggccaaaaaacacatgaaaaaatgctcatcatcactggccatcagagaaatgcaaatcaaaaccacaatgagataccatctcacaccagttagaatggcgatcattaaaaagtcaggaaacaacaggtgctggagaggatgtggagaaataggaacacttttacactgttggtgggactgtaaactagttcaaccattgtggaagtcagtgtggcgattcctcagggatctagaactagaaataccatttgacccagccatcccattactgagtatatacccaaaggattataaatcatgctgctataaagacacatgtacacgtgtgtttattgcggcactattcacaatagcaaagacttggaaccaacccaaatgtccatcaatgatagactggattaagaaaatgtggcacatatacaccatggaatactatgcagccataaaaaaggatgagttcctgtcctttgtagggacatggatgaagctggaaaccatcattctcagcaaactatcgcaaggacaacaaaccaaacactgcatgttctcactcataggtgggaattgaacaatgagaacacatggtcacaggaaggggaacatcacacgctggggactgttgtggggtgggggtgggggaagggatagcattaggagatatacctaatgctaaatgacgagttattgggtgcagcacaccaacatggcacatgtatacatatgtaacctgcacgttgtgcacatgtaccctaaaacttaaagtataataataataataaaaaaataatacagaggagtgtcactagtcccaatctgcagatagagaaacagactcagggaggtaaaatgccttcgagatcatattgttaattagtggagaggccacgatgagaactcattcaggtctagtggccagagtgtattcttgctaccaaatcactctcccactcctgtggacatacttgtttgaaagagaatcagatgtttatgaatgcttcttcaatgacaaggagaaactcaaaaacgtctttgtttaggagggtcagagcttgatgcagttgtaaactgaattctctctgtgtgtatgtgaatatatacacttgtatacgtgctgttataaaaatggagagagttgaatctctggtcttagtgtgaattgatacttgctccttgcctttagctcgatggatgctgaagctgatgctgcctctctgatcctgtaacttgagttattaggtgtctttagtcagaatgtccggaagtggaggatgttgtgaagtctgtagaccacagcttcagtagacttattattttcatggtacatgatacagaaaggaagatgccatcaagtctcctgggtcagtagggatacctaggaggtggagtgagaaggccgcataggaagtatgtgtttaaggaactccagtggaaatgtgttttggtcattggaaatgttagctgcaggatgttcacccttgcagacaaaactacttctttagcctgatacgcaaagctttctccctcatagtcccatcctatagctctgcaaataggcttgatgtatctgccaaatggggtcgttacctgctccctggagatacactgtacttttttgcttctgccttggtttatgtaacttcttgagcctgtgcctagaattactttttgcaaaaggtagctacccatcaagtatttatacacccatgagttaattcagcaggtactagttgagatcccactgtgtgccaggcactgttctaggtgcttgggatacagtggttagtaagggagacagtgtcactggtctttgccctgggggagctctcattctgacctccactgggtgaatcattcactctggaggctctgctgggtctccagcctggacacctgccctaggagcccttttctttgaaacttgcacttgaaactctcttgggctccaatcctgaaaaaaatgtttaattcctctggctgtcattttgctaatgcctccaggcagagagcccagggaagtatttcctattttcagagaggaatttattttgtaggttctttatccaagcctcctttggatgtaagtcacaaaaactcattcaggctagaaggagcagtaatcaggaggcagagagggtagtttgtgcagcctgattgctgacctcacagagactgttaccaggagctagagaattaagggggccaagaaagcaactcttggcctcttctctctctgttctctgctttctgctctgcactgctctttcctgagcctggatttacctgctttaccaggtacattggcagcaaatgtctgtcccacagctctggaatttatagagccttatttaagattaacagtggagagcaatagtactgtaaattcccattcctgaggtcagaggagagaataattgggtcagctgtgctgcccacagctccagcagctgtgatctgaaaggggatggtgggttctggaatgcaaaccaggctgcagggcctgtccctatgatagacacaggtcaatggtagaaaaatgctgatgagctaaggataccaccctcaagctttcctcttgaggcaatcaaggaaacttgccgtctgctcagtttaggatccttctccaaaccagcaaactgcaggattggcctcagctgacccttgtcctcaatcttaacaccaaggatggagaaactcctgtgttagcatggtacagagtattcattattttagaaaattctgtaagtactgtaaagtacctagagagccagtgtgtgatattaattttgaaggagagaaaatcattagggtctgtgagtcctctgttacggtaagactgtgtattccaagaaaataaagagcctttctcacaggggaaaaaaagaagcatttgtacagataggctgtgttctagattggcgatgggcaccgcagggctcatgctttataatgtagttcagttcctgtcacctgtatttgattgacttgaacatgctgaaatttgttccagtgtgttaacaggggactggtgtgtgtgcacatgcaatatgcaagttaattaacgtttgctttccctgtgcaaggcctgaccctttctggggacacatacagtgggcctgatgaggggagggaggtgtgcttacttgaagagggaggccttaaatctttcagatccctgagtttcataatagccattaagtgtctgctcaattgcagaggccgtaagcagtgtcgtctcaaacttggctattaactcttcagttatgtactcttggccaattatttcataggtgcattactaaattacagcatcaatttttgatgatgaaagcaagtgcatattcatgataaaaatttggaatacacaggaagtatagagaagaaagtgaaaagcacctgtcattccactacataaagaacaattactataaacattttggcatattgccttctcttattcctctgaagccaatgtgtgctgatgcatattttttaaaaaacaggagcatatgatttaatacctggtattctgtgttttttaacctgtatttccccatatcattaactactcaatgaatgcatctcttttacagttttattgatgtgtaatttaatttcatagtattagcccattttaagtatacagttgatgaattttaataaaattacaagttttgcaactataccacaatccagtttgggaacatttccattgtcttcccaaatttcctgagatctcacttgtaccctaaccccaggcaactgctggtccgccttctgtctctgtaaatgtgccgtctgtggacatgtcataggggtgaaatctctccacaggtagtttttggcatttggcttctttttctgagcatcactagtggtatcccccttagtgacgggtacgcccttgggtgcaacaccaaagtgcaaatatcataccatcggtcagtaccacctgttttcattgcattgggaaccacagtctgaaggctgtgagcatctctcctgtcagagaaaggcaaaacagcaaaggtgtttctcctcgggcaagagggcagcgattacaaatgttagcaggactgtgaggagaaaatgaggcatctgtgtcagcatctctctgacctcaacaggggacctcatcttagagcctgggttattgcttcattctgaaccgaagactgtgttacagctattgatttttaccatgaaggttatcttttgaaaccacaaggccagaaaaacattgtctgctttggagagaatgtggagcaccagagcaagaagcacagggaacgcgttctgcgaccaaaccctcccacactcctggaattgaaacatttttgctctccgtttgcactagctaattagagagacctttctcaaaccatttactttcttgcacggagcttaaaggactccccaaacatcttgttggaatgtttacagcctgtctgccttcagacaggtggaaatgatatagttccttttggctggaaccctgttcatatatttgaaagaggaaagctttcgaaaagtcacctcttctattaatctcagcagaaaagaaacttgtttggaccctcatacactttgtcagctggagttcaagttatgtatctgcattgttttgaggcaagtctgtctcatgcaatctgtgtactcttgtgaagacagcgaattttgtacagctcacagcacaagagccaggcagaaacagggagggagagaggaatgcctccattggcagagacccctagagaataggactccatggggatctgacggggcaccctttaaactcccttgtcaagatggaaactacccaacctgcttcatgttcacagtgatgcattggacatgatgtttatatagcctccaactcatgattgtttttgtctttcttttttttgttaagtagtagtagaggtcattgagattcatctcccaacaaacagacacatctgtttggaaaaatctcacacttctatttagtgctcccagaaatctttatgtatttatagatttaatgtgcatatttcagtgttcctgagaaatgtaaattctcggctttgaccagattacagttactatttgtttccagcaacttgggtgccgggcatacagcacatccttgccaagtaccagtgcctgagcacttgaattctgaaggatctcttactgtcttggcctgcagataagagtttctcacttgtgccttgagatcctgtgtgtttcttttttatcaaaacatcctcaggcccggacttatcaggaagaccagagcagatgtccatggatgagaccagggaggctacttcatgtccccgattggtccctagtggtggccaacatgggggtctcaacctggggagggccccagtgtctgctggaggtcttgtggcctcctgacttggctccctcctcctcaactcttttcccagtccctcctgagctttttcccaagctttctaggacatcatgttcactaagtcactcctttatccaaaagccttcagtgtcttccctttacctatagaatccagacctagctctcgagccttaacatgtatttctagctgttgcttcctagtcctctcaaattattgtcctacacagctttgtacacttaggcccttttgcctggtgggctcagtgatgacttttctttaatgtgcatcagaatcacctgagcatgtgataaaaaccacagactcccaggcccaacttctggggctctgctagtaggcagggagttgaccaacaccccaggtgatactgatggaagtgggttggggccacacttatgctgctctggcttttgacatctatcaatctgtgccactttttagagtttgactgaagtccattttccctgggtaacctcatctctccctcttggactctccctcatttttgcggcactcattatttgtgatactcactttgcacttagcctattttgccttggaccatgatttcaacgtttgttatatatgcattttttcagcagacatctgtctgtctgcctctctacacacacacagttgcttctcggccttttggataagatcaagtgtagtatctacacacatacatatatatgaaagtgctttctatttgcatgacactgtatcatctgaaaacacttttgtatgtattccttagctcctgcagagcagaacctttgctatctgcacaaaacgtggcacatccccctcctccagcccatagaagtggagaagcatccatggtgctggccagccagtcgctgtggtaatcatacagggcctgttgagataagcaaagcagtttctttcaagcattaggcaagtgttactgacggctggttttgtgctaggtgctctgttgggggctgggtgcagagcgcagatggtggatgaagcacacagagttctcggggtgggagaagatgagcgatgaacctaagcaggaaaattactaattgtgatattactgtgaggcaccaaacagggctggagtcttaaataatgggcaggaagccctctcacaagagggaacttgtgagctcaggtcaaagggaggggcacagtcttgtgaagagggctgggggggagtgtcgagacagagggaagggtggggatcccaggaggaaaagagcatgaaaagctgggtgcctggggaggttggagtggagagctgggacgtgggagcctaggcagggccagagaggggaaaagaagccacactgaccacctggggccttgcaggccttgctgaggagtttctatcactggctttcaggtgtgtgtgttactttgaatgtgggggagcgatgtgatctgggttagtagaacttgaatctgtaaataatggctctatttcaacaagtcagatgaaatcagggtggaacttgaaggtcaatgatgggtctggggagtgttctgtttgcctgggatgtgctgcggcaggttgatatgttttggattgttgtcccctccaaatctcatgttgaaatgtgattcccagggttggagatggggcctggtgggaggtgattggatcgtgggagcggatccctccccagtggcttagcaccatcccctcggtgatgagtgagttctgttagttcaccaagacctggttgtttagaagcgtctgggacctctcctttctttctgtcttgcttcccctctcaccatgtgacatgcctattcctgcctcatcttccttcatgaataaaagcccccagagggctcatcagaagctgagcagacgccggcaccatgcttatacagcctgcagaactacgagccaattaaacttcttttcttcataaattatccagcctcaggtgtttatagcaatgcaagaatggcccaatgcgcaggtcttttggagtcatcttctctcttgtgggccctagtgagggtctgattgtggtgctgcatgccctgggaatgagttaggtcttcttggccacactttggcaagtcttccagttgcaggggttcagaagactctggagttggaagacgtcttatggatccctttgttcaccttccttatttgagagatgacaaggcagacttagggaaggctgggacctatggctgcagccttgccagttacattggtgctcctttttctcacccagaggaacaaacagtcccttggccttagacagggtagcatgaacactgctgtacagctgagtgaagagcaggcctcctttgaatctcttgggaatcacagtggatgcccaggaagttcagttaggctaggaatttgaatcctagctccaccaccatttgctgattacatggcttttggaaagtcatttaacatctctccggccttctcctgtaaaataatagtacaaatacataccttgcagagatgtcaggtggattaaatcgtataatgtgcatagtacttatcacagttacctgatataataggtattcaataaatggaatgctgaaaatacctatggctgaatagtgcttggcttgtgtgacttccttagatgaaagctataattatcaaggtgaatgtgggactgggaagatctttgcaaagattcacacaactccttcctggcaaactgagagaggtttggtggagtgcattagaacattgagctcatgtaggcatggcctcatctcttcatctcagtctatgtctggcacatagtagtttgtcaatatgtatttgttgagttgcatgagtggatatttttactatcaagaacttaaagcaagttacatacctaagtatcagccttgcattcacattcacttttaatttttgcttctagctttctgtgtgaatttttacaatgcatctggtgataggtttggagcaggttcgtgtcttgtgatctgagagatatgtggctttaaaataaatgctgatgcatttaaggagtgaattaaactggccttatcctaatctaaagaggtagtgtcagtctgcattttggccgaagctggtggaaggagctgggaaatgcaggaggattgtaggtatgtagccctcaccataaaagccgctcgccactgacaattgcaattatagtttccatccccacagtgtctggggggtctctgattcagccagccaaaggtactgagtggagatacagggcagcaaagtggcaggaacataaatattatgaattgggcccataggtcatcccttagctcctgtgctttgggcagctcgtcatgatgaaatagctaattttcaggagcagtggcctggtgggaggcctggcagagcagagtgaggtctcaggtctgcttcccatgggacatataataatggctgatctggatccagctcatgacagttaattcccactgagcctagtttgagggccaggggagcctgtcttgtaaatgagagacaggaactacaaagaaggttctgaccccaaaatagcatttccttctaccatttgttcagtctctttcagatccttacctagattcatttaggtgaggagacctgtgggtgatatgctgagtgagccatgcagatggcttctcgagcttgcactgtgggatagcgtgtgtgcgcaaagggatgtggtgcattagaggagccaacaaaacaataatgcagaaaggttctgcaggggcatgagggcacaccgctcctctgtgttcccttctccctccccactacatcccacgctttgcatcagttcccattttattttcacagcagtgcttttttaggttggacattcctctaaaatttagttttaaacactggcttattgcatgcttagtgtccaaatgacccataaaaaaatctctactgttaatgaaggcttcagttggatttctgtgatgcaaggcatctgtattagggttctccagagaaaaagaaccaaaaggagatattaggagatatagacagatagatgtgtatgtgtatatataggtgtatatatatataaatagatttattataaggaagtggctcatgtgactatggagattgagcaagcaggagacccaggagaaccgatggtgtaaatcccagtctaagatttggtaggctcaaggcccaaaaagagcctatttttcagttccagtctgaaggcaggaaaagaccaatgccccagctcacagttacgcaagaggagctccctcttccctagcctttttgttctattcacgttttcaatggactggatgcagcccacccacattggagagggccagtccactttactcagtccactgattcaaatgtgaatctcatccagatacaccttcacagacacagccagaatcatgtttcatagaatgtctgggcaccccatgacccagtcaagttgacacataaaattaaccatcacagcatccaaaggctggggcggggtggtgaaagtgtgccagctgtttctgactttatataccatttccaattcccaaaagaattgcaggtagcaaaaacagtttttaaaagatcccatggtatacagagacgatgtcgtttagaagtagtgatgcagatggcttgggttggtggtgtggttctgccgcgtactgattgtgtgatcctggcatgtctcctagcctctctaagcttcagctatctcagcaggaaagtgcgaatgagaatagcacctgctccttaggattgttttgaggagaaaattaaataattcatataaaacacttaccattgtgccttggcctgtagcacactggctgctgttagagctgtgttctgcattgagaaggagagcagtgactagcgtcagtattaagtgaacactgtcggcctggcacggcgttaaatgctttgtctgtgtgaactcccttctggcctgcctgctcaggagctaggttcaggtcttagtatctgacttgctctctcccctgaagaccacatggatcatattttctcttctgggttttttcttttgtcatttaaatgagagatttatttcttggggagggcataggtcatccttgcaaactttcactcttcccagtccatcctcttcccgccatctctgtcctcagagtacagatgaggatgggcatatggcccgggaacttgaggcccctgacccagggacttcagtaagtttgccatctatctgggtgagatgtacagattctacagaatcacatggttgcccttccagtggtttactggcacagatttattggtcagtccaatcattttgcacaatttgttctccaattactggcaaagagttcagctctcagtgggatgtcaggcagcagcaaaggctgtgatgagctgctgctgtttccaccttaaatggcttcacaggtgggcgtggaccatggatggttaattccgcagtgtgatcttaagaatctgaggggtctctgtaggaacagtgtattcattttttccccttgctgtggcttttttccactgtttctttggcttgaggatctggattatttcccatgttaggaaggcccactctagaacagacaaatgggcatgcctttccagcagctcatgcatgtgtgtggcaggactcgtctatgattttggttcattttcttcaccgcgactctaagagctatgtgtttttattattttctaccttgcagatgaggaaacagaggcacagcctggttatttgctttgtctgaggttacacagcttgtgtgtaaaaattaagtctatgtttcaagaatgtactggcctattggaacaggaagcagcaagacaccattgaaagactcatgaaaggctggggagcttcctcttttctggaagattaaaaccgaaagtctcaaccactggtatctcagtttccctgatggcaaaatagatatagttgtattggtttctgccagtgccacagggatatttaacacttcgttatgttatactctagaatctattttcttatttgttcatgtgagttgtttataagattataaaaataaacctgtattttttatatcagaaaaattaaaagttactaaaaactgttagtttttggtaacatcagttttcattattgggatatacccaatgataataactacagctggcacttactatggggaaggcagcattttaggtgattaactcatcaggtcttcaaagctaccctgtgcagcagacactcctgctgttcccatttgacaataggtaagtggtagaggtgggacaggaaatcaatcggactcggagtgtgtgctcttaaccacagtactctctccctatccacatcaggaagcataactcctgggcttttcaaaaagttctgtttaagtcactgatgaatgaacatttttgtttgtttgtttgtttgttttagaatttaagagaagtgtattcagagtgaggctcttttggatgatgtcagaaataatgaggtttagtacagtatgtatcaaaatacacaccacttgaggacatcctgagagaaattacttgtttgatttttcacaatgggcataaacacagcggaatgatagatgagacaaattcaggtaatctccagattaaaattccgaacagtcaaatagtatttttctgtgaaaggttgaatctcctgataagctccaaattatattcccaccttatttgagaatatgtgttggcaggtttaacaagatcttggcacattctaatttgagatttattacaagatgtgtgcatgtttaatagggccttaattattcatatccacatcttcctgacagtaacttccttcagctgtagataaattcctggcacattggggaagattggcttttgctgttaaaaagatccagtgaaagaaaaatcaaatgcatatgcaagaaattacccagggcaaccagctcctctcaggctggagcttgtccttcatatgggattgccaagcaatctcttctgtgcccctggactagggagcaacctggtggaatagaaagagctcaggttctgaaggtaggctcacctgaggtcaattctggttatagcctaagaatcgaatgcctttggcctgatttcttaaagtctgcaggatctagattttttttttttttggatgcagaagtaggtacctcatgcctcccttaaagggttgatgttaggataaattgaaacatctgtcaattgggaggggtgcagtgtatggtacggggagtactgaatgggagctgcctttttttcatttcctcttctcctatcatcagtgctttgagtccatctatggatattacacaagatatgacacaatagtaattatcttttatggaaataaagggaatacggtaagaagtgctggtaaaaatgtagggaaataggtactcccagatgctgctgatgagtgggaattggtgcagcccttttagaggttgacctgttgatatcaatcagaaccaaaaggcctcagggcctttgcactcgctgtttcctttgcctggaatgtgttactcccacatgtctgtgtggctttctctttattttagcccttggcccaaatatgacttagagaagtcatagctggttgccccgtgtaaactaccactgcccatcactctgtggattgcttatgccactgttttctccgtagctcttaatatttcctggtattaacatatgcatgtgtgagtttgtctgtccatctcccccacaaatgagaggtctgagagggcaggggcctttgatttgctcctttctgtgtacccagcactgagagcagtgctatgtccagcacagagtgggtgattcataaatcattgagtgatataattaaaagttactgccttgaagttctgttttggcagacaacttcagagagctgggctgttagtttttaggaagcatgtacgcagaattcttcttagcaaaggcatcagtgacttaagagaagtgtttgtatacaagatctggctctcttgatgaggagggtgttggggtactttgttctggccccaaagcacaaagggcaatgaactcagtggccagaaaccatgtggcttcctgatgagagaaagatgaaattttcccgatttgagaaggggtgtcatgcaagggagggctggtatgtttttaaatatcaaggacatatattgagagataataccatagctgattggtaaatagttttttcaatcaaaaacttttattttcactattttgaattacataattaagccattattttgacaaactcttagcccagttgtcccccatcccaaaaacctttcctctcggaaagacagagctgttagtttgccatatctatttccagacatatttttgtttgtttatacacacatatatcaaactcaagatctgcaggtgtattgacaatttagcttccttggtaagtgcaaacccctcatttttttttttttcaggattgagccgtcaagcttgtctgcacagcttagtgttggtgatggtctgctctctctgtccctttggaaacgaaattttggggtggggaaacctgcttgcaaaatgggttgtgttcagattctttggagatttccagcttgtacaggaagtatagctttttttttttcctaattgtggttaaaaaaacaaataacatgaaagctacctccttaatgaaattttaattgtaccattcagtgttattatatgcatattgttgtatggctgaagaactttttcatcttgcatgactgaaactttgtactcattgaatagcagctccatttttcttctgcttcattctgcagcccctggaaaccaccattctactttttgtttttaaagtttaactactttagatatcccatgtaagtagaatgatgcagtatctcctcttttgtgactggcttgtattatttaacacaacgtcttccaggttcatccatttgtaagattttctctctctcttatttttgagatggagtctccttctgtcactcaggctggagtgcagtggtgtgatcttggctcactgcaaactctgcctcccgggttcaagcgactctcctgcctcagcctcctaagtagacaggattattggcactcatccccacacctggctaatttttgtatttttagtagagatggggtttcactatgttggccaggctgttcttgaactcctgatctcaagtgatccacccacctctgcctcccaaattgctggaattacaggtgtgagccactgtgcctggccaaaattttctctttttttaaggttggctaatattcttgtgtatttgtacaccacatcttacttatccattcatccatagatgaacacttgtgtggtttccacctcttggcttttatagatcatgctgcattggacatgggaatgcaaatatctctttgagatcttgattttaattattttgggtagatacttggaagtgggatggctgcatcatgtggtagttctctttttaattttttgaggaccctctatgctgttttccgtaatggctgtactaatttacactatctgataatatgtgagagattcctttgccccacacccttgccgacacttatcttttgtgtttttggtgatagtcattccagcaggttgaggtaatatcgtattgtggttttaacttgcatttccctgcttattagtgatgttgagtattttttttcccatacatgttggccatttgtatgtcttctttgagaaaggtctatttcagttttttaaaatacccattttaaaaattgggttgttttcttgctgttatttgagttcttgatatattttggatattaatcccttctaaagtatggcttgttattttttttttccccttctgttgagcccatgtcatgtcaatgtttgtttcatatatttggctcctctaatgttaggtgcaaatataattataattggtatgtcttcctggtgaattggcccttttatcaatatgtgatgttcttatttgtctcttatgacagtttttgacttaaagtctattttgtatgaatacatatgaccaccctgttctcctttggttactttttgcatggaatatctttttccaccctttcacttccatcctgtgtgtgtcctaaaatctaaaataagcaaatagtctcattttcttttaaaaaaaatccattaaactaccctatgtcttttgattggggaatgtaattcaatttcattgaaaataattaccaatagggaaggacttactattgactttttgctatggcttgaatatgttccccaaaatgcacatgttaaaaacttaatccccagtgcagcagtgtttggaggtggggcctaatgagaggtgattaggccatgagaatggagtgaatgaaataacagttattgcacgagtgggtttgttataaaagggagagttcatcttccttttactctctctctcttgctcttctaccatgtgattcctttcaccatgattccttttaccacgttatgacatagcaagaaggtccttactagatgctggcccctcagtgttggacttgccagcctccagaactgtgagaaaataaattcctgtttattataaattgtccagtctcaggtttcctgtgatactaaaatggactaaaatgcactttgttttctgcctgtctcttagtgtttttgttccttttttcctcttttgattttttttttggtaaggatatgctttgattcctttctcattttcatttatgtatcttatgtaggttttttgtggttacatggggcttattttacagttgtaatatctattttaagctgatatcagcttagcttcagtcacatacaaaaattctactctttgacttctcccctctgttttgttattgtcacaaattacatcttttgtattgtgtatccattaacatacctttatagttatttttgtatttttgtcttttaacttctatgccagaattaagtgatttacctaccattgttagagtattacaatattctgtatttgtaatatttatatatttacctttaccagtgagttttgtgtgtgtgtgtgtttttttttttttccttgagacagcatctcactctgatgcccaggctggagtgcagtggcacaatcatggctgactgcagcctcgacttcttgggctcaggttattctcttacctcagtctcctgagtagctgggactacaggttttgtgccaacatgcctggctaatttttgtattttttagtaagaatggggttttgctatgttgcccaggctggtctcgaactcctgggttcactgcctgcctcagccaatgagcttaatacttatatatgcttttatgttgctgaccagtgttttttagcattctttcttttcaacttgaaggactccatttagcttttcttataaggcgggtctagtggtgataaattttatcagcttttgtttatctaggaaagcctttaatttttcttaatttttgaaaaacacagacacacaaatctggattgacagttttctttttcttttttttttctttttgacagagtctcactttgttgcccaggctagggcatgatgttggctcactgcaacctctgccactggggttcaagcaattctcctgcctgaccctcctgagtagctgggattacagtcacctgctaccatgcctggctaattttgttgtatttttttagtagagataggatttcaccatcttggataagctcgtcttgaactcctgacctcgtgatccacctgcctcggcctcccaaagtgctgggattacaggcgtgaaccaccgccctggcccttttttttcttttttaatcactttgaatatatcatcctactctgttttggcctgcaaagtttctgctgatatatacactgatagtctcatggagactcctttgtatgtgatgagttacttttttcttgctttcaaaattctctctttgtctaacctttgacagcttgattataatgtatctcagtgtggacttttttgggtatgttctgattgagatctatttggcttcttggatttggatgttcatttcctttaccagagccattattatttcatacaagctttctgcccctttgtctgtctttccttcttctggaatacctataatatacctattggtctctgtggtgtcccatagtaggtcctttaggctttcttcactttttttttttttttctggttggtgtttctatgactgaataatttccaatgacctgtctctgagtgtgctgattctgtgttgcttaaacagttctgctcttgaattattctagtgaaatttccaactcagtttttgtgttcttcaggtcacaaatttctttggttaaaaaatactctttttcattttacagacactctcatttgtttatacacaattttcctgagcttgttaagcatctttatggtggctattttgaattgtttatgagataattcatataactctttttctttaggaccaatttctggatatttattttgtaactttgactgggctgtgtttccccattactttgtgagccttataattttgtgttgggatttgcacatttgaaaacacaaccactttccccagtccttatggtttttcttatagggaaagaccttcagcaatcagcccagctagagattccaagcgtctcttaaccttttggggagagaaatcttttctaggcttgtgtgtgtaatttcccatttagagagatttgctggtctctttttcaggcgcttgtagcctcttgctccctctggtgtctgtatgaggtatttcaggttttctggcgctttttctggcattgagctcttttctgttctctggctcccaggtatccaaagttttctaagtctgtcagcactctaagtcaggcaaaacagaaaccactccttctagcagcccttgaaaagccagaacacaatatatacattccacccttcctttccctcccagtggagaagccatgagttgggtgctttctgaaaattgtggcaagctgtgctggtgtctctgtgtgatactacaagttctctggtgctgccacaagcttctgagctctcttttgttctctgtggataccaggcatccaaggtatgtcagtttcccatcagcactctgaatcaggcaggacagaaaccagtcccttgggcagtttcctgaaaagctggaacattggaagtgtttcaatttcttcaatttccctcccaagggagaatccacaagttggactcttctttttgatcatgagctgtgctggcttgggagaaggattgatgcagttggaataaaatagctttttgttacccatttcaatgtagctgttcttgattttgagttgcctggggtactgtgacttcctaactgaattctggagttctcataaaggctttttggatcatgtgttgttttttttttttttttttttttgagacggagtctcgctctgtcgcccaggccggactgcggactgcagtggcgcaatctcggctcactgcaagctccgcttcccgggttcacgccattctcctgcctcagcctcccgagtagctgggactacaggcgcccgccaccgcgcctggctaattttttgtatttttagtagagacggggtttcaccttgttagccaggatggtctcgatctcctgacctcatgatccacccgcctcggcctcccaaagtgctgggattacaggcgtgagccaccgcgcccggcctcatgtgttgttgttaaagctggtgtttctgttgtgaagtgagctctcgggtttcctattctactgtcttgctgatgctacttaaataagaaggatagttttatggcattgcataaaagtgtatcctagcatcactctactgaaaacataactagttttatcattgatgccttccaagaaaccatttacaagtattaaaaggacttgctcttggagagatgtcaatctgttacttatagtgaacaataagcatattggaaaaatgtgttagatgaaagaaaggggtaatgaatggttttaaattaatagatctttcacctaaagctagccatggagcattgcttgtaaatcaattaaaggccaaaggaaatattcatcattgaattatatgggtttttacctagaagaatttccctcaaaatgcaatttccctggaaatctgtgaatcctcagttctctgatgagaggcagcttaaaattcagctgggtagtttctgtgatgtctcaaacaggctccataaccttcatgatatatagtcttggaatttgtgtgtgcctcctcttttctctgagggcagagattggacaaacttgaactgctgatatagagaaagtgacttatgttttttagctttcaactgcactgcttggcaaattttaggggctaaagcatgaattgtatgccctggatagaatgacatctattaaacgtcttctgtcactgagcaagtctgtgaatgaatgaactttgatttcctacagagaagcaggtgaatcggtcagtaaatccacattattgagtgtctctgccctcagcagcatgtcttgggattaggaaaaattttatcttgaccaagagaaaagtttaaggagggcctgctctgtgctgtctcatatatgctctggtttttagagtcttagctttctccccaaacactttactttcaaagaagggaaaattaaacaataggcaatacttgtttcatctttgaattcccattaatcaaagggtagtctcctagtaacatcctggatttgtttctatttccacttcaaacccacttggccatctaaacaattatctggctcaccatccaccagaaccctagttacagggagaggaatctcgagcactcttacctcttctcaaggtactgagagggattcccaggagactgggctgagaagacagacaaacccctcattataatcaggtggtccctcagtgctgctacctggaaataggaattctgcttgacattctagacaatagagccatgctttttttattatttaaggacagccttttctttcttctcaggtagtcgacagctaccaatttaaatgagctgggtttatggatggctgcagaaatcctctttactcaaacccagtatctatccatcagccactgcgcagcactttactgtggaggcagcggggggacagctcatcagaatcgccccagtggaatgttacgataggaaaaaagaggaatggattacatatttatgtggtctttgaaaatgcagtgggacaggaagattgcttgtaacgtatgcagttacattaaatgactattaaccttcactggttgcaggtgtctggtgaattcatttgtgcttgtgtatgttgtgtggcttgaaaaattaatgagactttttaaataatcaaattaaaagtatttgttactccaggttctggtgagctatcaaaacaaaactgggtacagcttacaaaaataaagtgtctactgagaagaataaaaatatgaattgaggggggaaattgatagctatgcggatcttggaaactagtttcatctgatggagtaaaataagagaaaatatgcccatcgtgactagttttatttgtagattatggttagtgaattctctcttttgtcatgaatgcttcacattctggaggaaggaggtggccttgcagtaatgttttatttctgtgaatgccagacttttcttcaacctgttgacttgtagggttgacgtgtcagacatggtgaagaacaatacctgtggagctgagccttcatttcctgaaacgtgtgtccaagaggcttttttgacaaggatgttttaactatgctgtgtacaccgttagaatttcagttttgtttttaaacattcccatctgactggagcttccctccatccattcctgaaactcacctattcctgatctgctgaagcccatgtcctctccagtgtcctgcattgcaccaaaacggcagtaatataggtcagggacgaatcccctgaagtccctgaaggttggagaccaccagatctcactacccttactccatggccaggagatggaaggaacaaggaagaaaaggcttccagcaatttcactgtaggacctaaaagcagaggctctttctgcttcttgactgaacatttcttacaaagccctctgtgcttatctagctgtagtgaaaactgggagggagacaagggctgtagttggtgaccagagactctcccccaggatacccgcactcacctctgccaaaagacatgcccctctgcctcagccaagcagtaaaatcaaggaccatccatgttgtgcccagaggcccttggaagaaggtgggctgcttgatcttcctagctgagtggccattcagagctcttatcagcttggaaaaaagagtaatcctcagaaggattcacagtgtcacccttcttagatgatgaggcaccatgggggctttggttcttaaatggatctcctccaaaggcaggtagatttgttttccagtgggcacagagcgggcccacgctgaacacagaaatggtgttattctaactgttaaataagaaaaattacatgttgtgagttaggctaattgatctgcagaattctggtttcctgcaatttaagactctgtcttgggcatgaatgaaatattcagagggcagaggagctagagatgaaaactgcaaggaaaaaagtagttagaataaggtttaacttgtacagttctgaattccagggatttaagagtaaaggcatccaaaaatactcctgctgccaaggccaggttgtcaataataaactgtgagtcacaagtcctggttgtgggcctggaagctagcagagaggggattcaactggcaggttctccagctctcagcctttagctcttcagggctgaaactttgctcgaattccttgaatcacatgatatcaaggaccaggagggagggctcacatcatagctgaaagaaaggacaaccccaagtgctcaggaaagacaaacttctttttagaacataaaaggattttttctagctagccgctgtgatttgaatgcatcacttcccaaattcaggtgttgctcatttgatagcattcagaggtgggtcctttgagagatgatttgagggcatgtccttcatgagtgggattatgactcttataaaagaggcttcacacagtagcatttggctctcgtccttccaccatgtgagcacacagtgttcctcccctttggacggtacatccctccttggatgccagatgctatcacttcaatcttggatttcccggcttccagaactgtgagaaatgagtttctgtcctttataaatgacccaagtctcaggtattttgtcatagcacaagtgaacgaccagccaagccttcaacaactagcggctcacctctcagaaggcagtctgctttccagtggccttggcataacctgggagctatcagaaaggctgactctccagcaccctgcccccaactcccctaggacctactgagtcaaaatctgcattttaataagatctcctggggattcataggcaccatgaagtctgagaagcagagagggacggataagttgtctgtatcatttcagcagatcttcatgggaacctacagcctgcctgccttgctagtgctggacacagtgggaggagacagacactgtgcctagtctcaggaagctaactgtccagaggagaagatggcaaataatgatcatgaaatgacctcaaaggggtgtttgtgagagccttgagccatcagtgcagcaggaggccactcgatgtgctctggtggcatgtcctggcatggaggtctcctttctctcctgtgtaaaacagaggcattgaaggtaaagtgctcagttgctcctagctactgcttctcatgtatcaaagtggagatggtgggggggttgtgggatgccatatctgcttcacaaggctgctaagttattcatcaaaagtttgctgaacctgtattctctatccatcgccatacgtggttcagagttgaagacagatccttggaactcatagcctcatgagaatgacagatgagatggagagagaattacagttccatggagtacagccccatggaatatgaaatacagagagtcactgaggattagtgttgaattctgtccatggtgaaccttggaaggcttcctagtggaaggagatggatttttagctaagacagtgaaactattccttgacatagttctagttctagcttttgccattttttttccctatcagagaagagtagggacctgtcgggattggcaggggtaagcagacaggtgagggttcctattttagagaagctacaggatttggtgcatactgaagctgactttggtgcatacagccactctttcaaatgttcctgaagacaactcatttctgctgggtattgagactgagctggtgcatgtaggtggacagacagttttaaacactactatctcagtaaagccaattaaagacatggaactggctggggttgtcctgagagcctaatttatggagcacctgcttggtgctggtgctgagctcaggatgagaggcagtggaggagtaaagagaacatggaaaacgtggtccatgcactctaaaacctttaaatatggcaggatcccatatgtccttttaaatagagccaggcagtaaaccgatagctaaggactgtagctgtggataaacaatagacaggtgacaaatactgatactggctacttttcatagagaacagagtgtgtgttcctggcactctgctgggtgctttatagatggcatttctaattaattttttgaaaatccccaaagcaggttttattatctctgttgtacaggtgaggaaaatgagactcagaaagcttgtcattggaagaactggggttgcagtacaggtttgttatgtgccaagtcctgtcttccttctgtggaatcatgtgtcacttctaaatcaagcccacagaagctggtggagatactagagtgcagagatggtagcgtttgtgaggctggagtttggaggcctttgaactggtattagaaagtaagaattgtcccagtatcatgtgagagaatgatgttttctggtccttattcactgatgagcagtgatgtgcctggttgccttgttaattaaaatgagccaagaaaaggaaatgagatgggcactgcttgtcctcagagactgtcaggctggggaggggctggggagaaatggagggttaactgggataaagcccctgggcaggaaagcctaaggggtagagctcagagcttgaggccaaactgaattgagatgatctagagacaaggagctctgagaggacgatgggaggagagcttggatgtctgcaggtgggtgtggtgcaggaccatctgggaacacaaaaagcaggctctagccagagtctccttatctccctgttgtgagcgtatgtcagttctgctgctgctctcttctgtgggaagcatttataaaggggttcttcatttcccccaggatgtggagccttgcagtatatgatcagaaagagctaggtaggaaaatggttccttttcctgtcatgcatgaatgcaacccttttgtaaatgcccttggtccaaggagctctggaagaactataggcagcagctgggtagggtagggtggcctcctggccaagcagtgggttgtagcttggatagacttggatgattgttttccccagagcatctatatttgtgcaaagtagcaatatgttctgggagcttagaagaatggggtcaggttcattttaagaggaggtaggaggcaggctggagcctgtgactctcctatggatcccttctgaggctgctggtgtccttgttttgggtgggtgtcacaggtgcccggcctgtgccctgatgatttcctgagaccaccccttgcagcaggtaagacactttctgaagcaaaatgctgggctttacttttcttctctttaatctttttgtcctgtcaatgtctggctcttctgtgtgcccatacctcatccctacttccaactaaatgattgtagtgtcctatcaataaggctaatagaattaatgagtatagcagggactggcttatgtgttgctccaaaagtataatgctttatgtttattaaaacacacacatctccactgggcttttaggagagactctaactgtgggaatttcaggcacttttgggaatggatggtagggacacattttggtccaggtaacttaaccccaccctctgttaccccaagtaggtggcattgtgttctcctgggtctagcctttcttttactgtaggagctgcacggggaagacagcaacccaggatactcctggttgggattcatgtttacctgccagtaggaaaatgggcctgtccctggttgactgtggcctgatggtagctgtcatccttcagatctacacagaagtgggcattcctcctccagtagcatttagtcttcagagaagtcctcctaacacaaaggaatctcctgcaagtggacaatttactggatggggatgatgggagagagatagaagtaggattttggggcagagagagcatctcttttcagaacctctatacacagcccctgtgggtgctttcctgtccactgtaccctatccactgtaccctactcgctgtgtgcttgaaggatgggcctgctgctcctgaaagagcacacattccaacctaaaccaccccagattcctgacagctgtgggctcctgcattggcacttcttggaataatataattcgtaacccagcatctgaatttaaattaagagaaaacaacaacaacaaaaaatttaaaaaaaacaaccaaaattctggtccttcctcaccagtgtggtgacaaagggttttgactgtttatggcatggttttcctgaaggcctcagcaattttttgctttattctccaaccctcctggaggaggtctctctcatttgagtgctgtggggatgagatcaagcagatccatgaccctctgaggtcccaagactaggccagaccctggagtctggaacctgtgacattccttccctctccacctctcctgacagcaggctgcctgggaccaggcatggtaagctctttcaggccagctctgctgctagggatttaagggagttgagtttgaatattgagccatcccctagggggtttccaggcatttattgaaatgagatgtgactaggatctctttgaaaaagaagtacccgaaagaattggcatattaatggagctacgtgccaagcaatgaaagtgtctccacattttcaaatacctgggtacctgatttttctagtttggggatagaaatggaagactaacttttgtcagacagtaaagcctaattaattcaggcgagctaagtaaattagggcacaggcatacactgcgatgctaggcagccactaaaatgatgctgtagaatatttaatgatatgaagcaaagttcatgctttattaagtgtaaaaagcaggttacaaaagactgggtacagacttatcctattctttcataattaaaaaacagtatacaaaaagactgactaggcagacatcaaaatgttaacagtgattcttcctgggagttctgctttcaggtgattattttaaaatttttacatatttatatatttttcagagtatacatgatatttatcaaaaggagaaaagtcaataaaagtgtacacatgtgcttatgtgtgtgtaaagattagactgaaggaaaagagcggagtagatagtttgaaattatttaaaattatgttggacacattacttatgcttgcagatgaagaaactgaggtttaacagagtgggaatatccttatctgttatatatgcttgttgtaattatttatggaagaagaacatttgtaaggtatccaagacagtggtatgttttaatactccccaggtggttttaatatgcggtccagattgaaaaccaaacattagcatggtggctcaggaacagacagaaatttgcagtcaccctccttcccacccctcaacaagagaatgtagggaggtgcttagcacatagtaggtatccagaagattcatctttttttttctgggatcagtgcttttgttctggttaaaattaaaccatgacattctgaagccaatggggaaaagagatgactttgaatttatcccttttggattatctctgtttgttaaaccaacactcagaggctctaccttgtggcctgagatcctagtacccatttggaaatgtgctttttaagaggaaaacacatagattttcagactggccttccggaggtttgctcttgaatgagagaagggttccccaaggcctgttccctcacagagggtgcctgtgttagggaattgagcagtccttctgttcctttgtcatgagggtcaaattgattttaaagctgtgtgttacctgcatctgggggaggtagctttttcttctgttcagcatcatagtttctcatttcctgggtggcttttgcagttttacatggatgttattcagtagaaaatagccagtaagtgttctccaaattattaattcattaataaacccattaaacccttgcagctttgcagcaattaatgatgaggtccatcctccattggaactgtcattttcagatgcagattcccactttgtttgagtggaacagggcagatataggaaaaatgccaaagagttgttggatgacagggctggagatttttgtgcaaattctcctttcgtcacagaaagcaagttccacagaggccagctcatcaagtatatgttgctgttttgatgattaatgattctggcatgttgatccaccctactttcttcaaaacaattatttcaactgtagtctcctctggggaatggcttcttatagctaataactcagtagacgatataaaattcttaaatgaggatgacactagcatggttccacctggatgccattatgctgtggtgtttataattacagcgaggtctgcttacttttttcctgagctcagaaaagcttggtgccattcatttaaatgggagagacaggaacttctatttatagagactgcccatgctgggagctgtgttaagcactttgcgcctacgttttctcatttaatccttttaagactccttttgaagaaggtaatgtcttttccattctacagaactggctcagagaggttcagtaacttggctgagacacacagctagtgagtggtgccacctgaattggaagaatcacaggatcctggcttgaaagtctatgctctctttaggcttttgtgcctctggggttattgtacaaagaggcaagcaattttgagtgaaggttcctcggtaactagattaatgatgtatatgtggaaaaagagacattaagtaacaactatttatagaatgcctatgacatgtgatatgtcagaccctcttggaaaagtagaaactataaattgaatggggggtactcactgtttgagcacctcctacttgggaggcatgatactagatgcttcacatgcattttcttatttaatcctcaggatcattctatgtgataagtctctgtagccttaacttagagctcagcgaagataagtaatctgcacacatagaaacacagattttaagtggcaggaccaggatttgggctcatttttgagtttgttattaacagataattacagtgagtgagaatcaggttatagcgcactcaacccatgacagaggatcaatgtactcatcagacacataggatgtgtttagtgcatgtcccaagaggaaaggagcaggcactgggtggagaataacaatgcctggctgagaaagtgggcaaggcttcaggaggaggggaggtttggtttggttcctagggagctggagtgggctcctgaaacaggtggtgaggacaaaggcctggagaccaggctggggcggccaagaggagcccacagaggaggtgcctggcacctgggaccctgagcaggaattccaggaactctttgcccttctccttatccatacagttttcttatgggctctctgctgcccctctccttgtgccaggaaccagtttggaaagctgttccccttgggagtctctcagtgttacagaggagaaagaaagatggcaatgatgtatgcatccttcacttcacactgaagatctatctacttttagatgactttttccccaaaatgcaatgggaaatttttttttgttctgatattaaagcaattcctactcattacagaataatcaaattctttagaaaagcacaaagaagggggaaaaaatccagcatctcaccacctggagataaccacagtcaaaatgttatgtatatttctccagtcattttttttaagtgtgtaaatgtgcatacttctcaacgtctgctctctgggtataacactgtttcactgtcttctggttctcttcaccataaccctcagtcatctttatacatcagtatgtttagatatgtatcattgtttctaatggctgctgagtactccataggatggttgtataaaaattcttctttagatggtgtatctgtcagggtccaatcaggaaaacagacccataataggtgttttaaatggaaaatattttatacagggaattggttacacaggagatgaaagagctgagaggagcaagaaattgctaccacccctgggctaggggtcacacgggaggaggcagtgatgataccagaggccaggagccagggccttctggtaggagctggaaccgcagatatgctgtcctttggaaccggggccctggaagagatgcatggcactgctctctcactgctgaggtgcccctcaaagcaggggaagctggggagaaatgccctggcttctggttttctaccttccaacattccatctgggcctcccactggacaaagctgccttgctgcagccagaggtcaaaggagaatgagaaatgcttttctctctgatacagagcagagcagaggagaggcagagccaggaattgttctgagatcaaataggcagatgactggtaaggatgagaatcagtcaacttagtccaaaggctttgtgtgtctgaaaaatcttggtagaattaatgagatgatatctttttagtacttttgcatgccctgcactggctgaagtccagttgggaatacaaagaactataggacattgctcctgctctgtagtaaagttcaataggggagataataggaaggctaacagcacctgctgtttgttgagcatttactaactgccaggcactgtgctcagccctttgtgtatatcatcattttaatcttcatggctcatggcatcacattcatttcttttggacatttaccttgttttgtcattatggaaatgcatacctggtttagtgcaggatgtgttcctggaaatgaaagtgctcactgagtcagcactatgcaaggtcatgacacttgagcccctgcagcacagcgttctagtcttcagatgttggcagtcacccttccaggcaaagtcctcaaggccatgtcaggcatccatctttgcctattatactctcaatttctgacaactgcagggcagtccatccaggctgcagcagtttttatgatgtgctctctaagtcaccgaagtggtcaccaatgactaaaagcctgctggcctttgctctgtgttctgtaggtttttatctgggaaattggcattttagcatcatgtgccagattcttcctttgctagacaacttttgcaaaccattatgagtgttacccacaatgggtaaaaaccatggaccagaacacaaaaaaaatggtgagaagagaagcttcagcatagtgcagcagaattgaattggctcatgatggtgtggcagaacatgttggctgagagctttagctgtatggtggggccgtgttttttctccctggctgagagcataaacagttcttggagaaaagtaggtaaatcaaaactgtgccattgtggcttatgggtatgtatgtttggtagttagaaatgattttggagacggcagttaagtggctgggctcttccatcagcaaaggcctgcctccagctttgtcctgtgagaataaggatcatgtcttgcttttgtacataattgtatctttatctcctagtgtgtggaaacttaacaaatatttactgggcgttggatatgtacactaccatataaacaatcctcattttacaggcaagagcattgaggctcaaataggttagataaacaactagcaactagcaaggactagagttgggtaagggtggagtctgacatcaggatgggcctaccggagggttctgtgtgtgcttagtgcattctgagaccactggattttccagagagagcagtaaactcagagattgcagttgttcaaacatgggtgcacccagattttgtggggcctaaagcttgtatgacatagtggccttctttataaaaaatccccacagaattatatatacacgcttaggagtaaaattatgtgttgtttaggctgagaaaataaataatcacaaaattataaactttaaaaagctatgcacattacaaacatggtcgggtctgaaaaaaaaaagaaaacagatttacattgtgaattaactgcccaacacagctttataataaaatttccccatatgttatgttttttgctgtatactttttggttgtctctttatatgacatcaattttgtaatctttctctactgagagattgaaaagataattcagtctttcctctagcatggctgaggaaatttgctttttatttttgataattggacgaagaaagcacacaacttcctacacagatgtcccctgctcaccgcttgtcatactgctcccctcaagcacagggaatctaattaattctgtgtcatgtgactcccacccagagatagaggaacaaagcatgagcatttgtgattgtacatgctgcgttatcggggacactcctattggatgagaacttccattttaaacaggcagcaacgagcaccaaacccccatggtggttttatgtgtctgataactggcaggttgtgccacaggttagattctggctttataggtttcagaacttgtttctcctccaccttcctggacttccagtgctgtgcactgtatgacgtgttcctcttgtcacatgacttctcgccccattcttaagtgttactgtgagttcctgaaagccatttccacgccatggtgactagcagtaattctaactatacacagaagtgaccaccaactacacagtccaccctactgaatcctccttgaatacatccccacctcttagctggattccagtgctacctggaacaaggtgagatagaaagagagaggtcttaactaattgttgttaaaagatcttacttttgcacatcgtatgcaaacatatatccatgtgaatgcattgctagggcctgctccgagatcttggaaagagcatgcacaagaaggagacctgaggctctcttaacctcacagcatggctgcctctagttcaggggaactctggctgccttgagtgaagaagtttgcacggaggaactggagttgagctgggtgtgaaggcagtaggactgggtgcagcctaaatgagaaggcgtgtttttacagcggagatcataattaaatggccgttaagctgtgaggacaaggagatggtgtagattaaatgttaagaatggccatcccgaaacctgtcggtgttgttgattacagcagagtggctgacatcccatggagcacttccggtggccaggtgagtttctccagccctatctcagggagtctctaggccatgcattgaataagtcttaacctctggcatctatgaatgtgaccacctttggaaatgaggtctttacagatgtaatcaagttaggataagataagcaggatggggctgaatcctatatggcagacatccttatgcagggagaagagacacggggcacagacacacggggtgagagtgctgttcaaggcagagggtgaagtactgccttcaggcaaacacccagggtggccgacaaccactagatgcttatcatgggataagcatgagtttggtgggtcattatgtgttatgtaaggagagagtttactaacagtgtaaagacataagcctgaataagggctacagcaaattcgagggtggttaataaaattggaatgatgagtgtaattgaagctatgggtaaattaatagttgaagctaggaaggggcaggggagggttctcccctacagctttcagagggaatgtggctctgccaacgctttggttttggatttccagcctccgaaactgagagactaagtttgtgcggtttaagcccccagtttatggtactttgttaaagccaccctaggaagctgatgcactctcccctgccgaacatacaaagtaggtgcagtcacagcccccactggcagaagaggaagctgagacacagattaagtgacttgttgatgtcacacagccactcacggtagagcctgggcagtgcatccactctcctctctgtagagaggcccttctggtggtattcacatggtacatgggccactggtccagagcagcagggggtcttgctcctcaattgaaaagacaatctgctttgctcacccagtggggggaagctgcctcccttaccaaacctgctggtttcccatgttgcagacctcaccagggcaccttctgtggcacattcttaatttcctcttcccataaaaatcctattcctgactgccccacacactctgcagttcctgtccccccgccccgcacaactcagcttacatttcagctggcacacttcaaactgataaacttggcaaagcatatgcccttcatttgagggccttctggaagcctgagaggaaaagcagctggggcagggcttgtgagctgctgtttacacaggtttattggcaagcctgtgtgttccagggcctcggtcaggtgctgtgggaatgcagagataaacagaacattgctcctttccctaccttgagtattacatgtgggttcaagcctttgaacatcaaaacctcgtttcttatggatgtaaaattttgactgtggttttctccaggtgatgaggtggtggattttttcccccttctttgtgcttttctaaagaatttgattcttctgtaatgagtaggaattgcttttataacagaaccaaaaaaaaaaaaaaaaacccattgcattttggggaaaaagtcatctaaaagtagatagattttcagtgtgaagtgaaggatgcctacgtcatcaccatctttctttcttctctgcaacactgagagactcctaagggggatggctttccaaaccggttcctggcacaaggagaaggacagcagggagcccacaggaaaagggagtgtgtacaaagaaaggagaagggcaaagagttgctggaattcctgctcagggtcccaggcgtcacacgccttctctgtgggcccctcctggctgccccagcctggtctccaggcctttgtcctcaccacctgcttcaggagcccactcctaggttccctaggaaccaaaccaaacctcccctcctcctgaagccttgcctgccttctcaaccaggcattgttgttctccacccagtgcctgctcctttcctcttgggacaagtactaaacacagcctatgtgtctgctgaatacattgatcctctgtcatcggttgaccatgctatgacctgattctcaatcgctgtaattacttgttaatagcaaacgcaaaaatgagtccaaatcctggttctgccacttaaaatctgtgtgtctatgtgtgaagattacttatcttcactgagctctgagttaaggctacagagacttatcacatagaataatcataagcattcaataagaaaatgtatgtgaggcatctagtatcttgcctcccaagtagcaggtgcttgaacagtgggaacccctccccacatcttataggtctcgctttcccaagagggtctgacatatcacatgtcataggcattctgtaaatcattgttacttaatgtctcttttttctacatatacatcattaatctagtcacaaaggaacccccactcaaaaatgcttgcctctttgtacaataaccccagaggcacaaaaagccttaaaaaagtgcacactttaaaatcagagtcccgtgattcttccaattcagtttgcactcctcactagctgtgtgtctcagccaagtactaaacctctctgagctggttttgtaagatggaaatgatattaccttcctcagaaggattctcatgaagattaaataataaaatatactgctagtatgtattgagtccctactttgtgccagccctgtacctgttccacatctgaaaatactattgtggaaatgaatggaacaaccccagccttataactccccaaagactgagacagcagtgggaagcaaaagatgtactattttgagtttcttaacgttgagtccggaagtcctcgtggatgcagagttcaaggacgttttagaaggtgtaccttactcctgaaattatttataacgtatatgtatgtgtatatatgtttatttccatgggagaagaaatatagttgggttaggcttttaatggcatctaaaactgatttatttatttatttatttatttatttatttatttatttatttattttttgagatggagtctcactctgttgcccaggctggagtgcaatggcacaatctcccctcactgcaagctctgcctcccaggttcatgccattctcctgcctcagcctcccgagtagctgggactacaggtgcgtgccaccacacctggctaattttttttttttttgtatttttagtagagacggggtttcactgtgttggccaggatggtctcaatctcctgaccttgtgatctgcccgccttggcctcccaaagtgctgggattacaggcgtgagccaccgcgcccagcctataaactgatttaaaggagcttcaatgttaattcctcatgtaaagcaaaggaatctcctacaatatgcatgttctcctacaatttatcattcaaaactatttaatatctaatttgattttctctttccctttacattctgattctaaaacgtctcgtttctgtggagtggaccagcctgaatttctggacaactgtttataggttctgcaatattatttggcagtaagttcaggctgtttataagatgcctcttcaagaaccaatttcattttataatggttgaaagcacattgttttagaagcgccatgaccctcagcattatgggccacctggagtgggctcgtggatgtcagtcatcatactcacagctcttgccatcctcccagtatttaaattattcattgatgactctgaagcagtactgtttagagaaaatttgtgtatctggagttgttaaaatagaaaacctgaaatcagcttgcttttcattattctgtaaattgtctctgcttgtgtacaggaaattttgtaaggcatggaatcaccttgccaatattagttgagtaaactgtgtcattgttcttccttctgcgccctgagtagtccttgcccaaaatgagaacatactcaaaaaaaaaaaaaaaaaaaggagacgaaatgcttaatgagtatgtttgctggtagttcctgaagatcacaaccggagttcataccctagaaacaggagatgcaaagatactgctttagtattgactgactgttctagagtaggccaaggggaactgttggtggagttggaaggaaggtttatatggagctgttcatgcttctgaaggagttcacaactggtgttggcagaatatggtactacctgcatcctgcccaaaaatagtttccctgtggcttccccagtttcacaaatattattgtcatgatgcctctcagttggtaagctgctttgagtaatatcagtgacaaataggtccaggacagccacaggcatctactgggatctgctctttgtccaggctggaggagaagatcctgcaggtgtgagtatagcagaggcattccccctttcctgggaaggtggaggaggtccctctataggtcctgggcattcctactgggagctccaaggctgtaaaagaattcttaattccaatggaggcatagacaaagagactaaggggtcagttaagagactagaagattcccagggatgtctctgtttcttccctgtttggctaaggatgagcctcttcctttattaagaccacatggtcttagactagactcctaaagaagcctcttctctttgaggaaaaaaacccagtggccaccagaacctgggagggaatggacccttgtgagaagagagctgcacttggtacaatctgtgttcatggggctttctgtgtgagggtgacctccattcactgtggcacggagctgctggaggtcacagctgagagctgtgttacaactgggtttcagaattggaggaggcagttaagaactgctagaacaactggaaagggagggaagacatttcagaaaggacggaaccacagaaggggagcactaaaatcattgtaaactctacccaagttattggcggccctctgaactcacatgaatgggtgagactccaaggtttccagcaaaaagcaacaggaaaagtctggaagaactgagcagtttcagctgtgactcattgcaggggagacagtttggacttggagtctagccacattaactgcctattggaacataaaaataaaaattattttaaaagaaagataaaagaacctagagactctttgtggccaacagtatgttctatacaatacaaatcgctaggcatgtgaagaaacaggagtgtctaggtcatggttattagacaattagatgaaactgaccctgaaatgatccagatgtgagaattaggagacaagtacttcaaaaccatgttataaatatgttcagagacctaaaggaaatggagacataatacgcaaattggggattctgagcagaaaaatggaaactattttaaaaatgaaaattctatctgaaatgaaaattttatcagatggagtccagagtagtttggaaatggcagaagaaaaagtcactgaatctagacttacatcaataaaaacttacccaatctgaaaaagagaaaaaagtaggaaaaaagtcaacagagtatcagggtcctccaggacaatataaagtggtctaatatatgtgtaataggaatcccagagaaagaagaggaaagtcggacaggaaaaatatttgaagaaataatggcctaacatttcctaaaactggcgagaacattaatttatagatacagcaagctcagcaaactcaaagaaggatatatacaaagaaatctgcacttaggtatattatagccaaaatgctaagaaccaaaagaaagagaaagttttaaagcagccagagagggcagaaagatacattatttatagtgagaataatgatattttaaaaacctgactctttattagaaataatggagaccagataacaatggaacaaaatattttaaatttaaatttatttagaacattaaaacctgtcaactcttaaatctgcattatgcaaaaatattcatcaaaaatgaaggtaaaatattttcagataaaagcagaaaatttttcaccagcaaaactatactgtatgatatgctaaaggaagttcttcaggctaaaagacagttgtaccagatggcaacatgaatctacaggaatgaatgaaatatatgtattttatatgtaaacataaatttatatataaatataaatgtatacaggactatatatgtatatatttttcttctcagtttatttaaaagacagtaatttggatcaaaaacttaaaaaactttattggatttgtaaggggtatagcgtataaacccaacatatattatgtaatatgtgcaagtgtattcatatatatgaacatcagcaatagcctgtaggaacaggatgtggggaggggataaatagaatgattgtgtttcctacattaagtagtacaacaggaactctgcctagactgttttaattaaggatacatattgtgatcatcatatcagttactaaaaatagtaaaagatgtagccaaaatagacagtataagaattaaaatggtatgctaaaaatattcgattaaatgaagaaaggagatgagaattagaacagatggaacaaatagaaaacaaataggaatatgtcagacctgaatacaaccatctcaatgattatattagatgtaaataaacattcatgtaaaaatcagaaattgtcagactggattgaaagggaggacacctaaatgttgtctacaagaggcttacttgaaatatagagaaatgggtaggttgaaaattaaaaggtggagaaatatataccatgcaaactataaaaataagaaaacttgagtgacaatagtaatatcagataatagaccttaaaagaaggcatattaacacagataaagagaggtacttcataagaataaaagagtcagttcacccagaaaacctaacagtcatcaatatgtatgtacctagtaacagaacttcaaattatttgaacaaaaccagacaagtataggaagaaataaacagattctctcttgtagctggagatttcaacactcctctctcagcaattgatggacaatcagattaaaaattagtaagaatacagaagatcttaaaaatgcaatcaaccatcttgacctaattgatttttgtggaacagttcacccaaaagaagaatgtacttatttttaataagtgcttgtggaacatttgccaagagaaaccattcagtgtcataaataagacccacatttcaaaccattgaaatgttatgaagtttgttctctgaccacactggaattgaattagaaattagtatcaatacaatatcaacaaaatcctaaataaatggaaattaaacatgctctcaggagaccccattctggtatccaaagcaagagaacctgccctcagggtggggtatggtcagcccatcacagtgagaggaaaaggcacctggcattcactgggtcctcactgcacacatagcactgttaaaagtaccttaaacgtaatcttcatacaactattcctgttttagaggtgagaagaatgaggctcagaaagtttgagtgacttgcccacagtttcacagctagtgggtgggtgagctgaggttggggccacgtctgtctgattccagagacagacttctctgggccacagtaaaataccgcctttgaatcatgtttgtatggtcacatttcctgtcttgatgagattttgaaattgtaccacgctcttttctgatgaaaatatgtccattcctacccgatttgtactttctcctatcattttcctccttctgttaaaattaagtgtgccagaagtctgccctgtgcacctcgattgaagacattcactgacctcctagatcttagtgagataacttctgacaatccttggtctgctcatgtttgtgccctaccatgtctccccaggctctccgttactttcttcctgcctttgtcccacctccccaccctgttcctcgaggatttgaatgctcactgcaggccaggccctctactaggccagaagggacccctcccctcacaaaagagagacacacctcatagtctccttaaaacatagtctgatacttatcgttgttaaaacaattcatgcctgctatagaaaggcataaaggaagaaatgtctcttatcactaagaggtagctacccttaagttttttttatatttgcttccactgtgtttttgttgtgcatgcttaacaaaaatcccaattttttcagttataatttcataaaatattctcattatttcagattctttggaagcatcttttctaatgtatcatgatatgctgtggagtgaatgaatcatagtttactcagtaattccaaaggagacgcattctgaggacagtcttaattaaagggagataagtagacacatacacacttatttgtataaaaatatacatgtatgtgtgtattcacacacataaagatatgcatacatacatgtatgtgtgtgtatatacatccctctttaattgaagcttaacttcaagaaaaggcaaaaagaaaatatacatacatattatgtttatatacatatacacatatgtatctattgcatgtgtatgtatgtattgtgtgtttgtacatatatacacacatagatactcttgtctgtccttcttgaggtgcactccagctaaaattctttaagcaaagtacattgcagttcattgggattagctgtgcctatctccccgttttgcaggagggcttgggtagcctggtctcaggaagcctgctgttaggtctctgctattccatacatgggcttcttcaaatcccaagtccccagtctcccacctgtgtgagcctgtgtcaagattctgcatagcattgaatgtaccttttaacctgtctctctgggatgatgaattatgctagtccggacatctccaccagtccttccagaggaaagccctaaactgtgatttatcggtgcttgtcacagatgagtgctatttacttatgaggcctgcattagtgccaggtcagtgggaaagccttttcatcccctgattcactgggcagcacttgtccaacagtaatgttcacagacagagccgggagcacaatttcacagcctggatgctcctttagttcgcgttcagtcggccatgccatgctttgcagtcacccatcccagcctctccattacttggacgcccagccttgctgctttgctcatcactcgtgactagaaatgacgtcctttaatgcaacctgagtcctgagtttgaatgcgggctccccttgcgtgacttggtgatatttgagaaaggcatgcatattgcctttctgtgcttttgtttcctcagcttctgacttagtctgttcaggccacggtaacaacaataccatatgttgggtggcttgtaaacaacagatacttatttctcactgtctggaagctgggaagtccaagatccaggcactggcagattcatcatctgaagagggcccattcctcatagatgctgttttctcactgtgtcctcatgtggcagaaggaatgcggggtctcttcagggtctcttttatgagggcactaatcccattcatgagggctgtgccctcacaacctaatcacctcctgaagactctacctcctgacacctcacattgggggttaggtatcaacaaaaaatctgggggagacacaaacattcagcccatagcaacttcttaacaggaataagagtaaaccaccccctactgagttgttcagaagattcaggaaggtgataaatgaggaaaaacactgtaaaatgaagtagtatgccatgtgtatttattattttaatatataactccactcatatttgattcacataaatcagaaaccacacccaataatatgtattttttttttttcagtaaaaatgtattaactaaacttgcttggtcagtgaagtgagtgtacccttaactccctgatgccagcattataaacagtgtctgtagttggcctgtactgggggaaaaagtcacgtggctactttagcaaatactgggtcctttaattctcagccttcattgcaattgtaaaattgtcagaagtgataaagttgtatttttcttaaatgaaataagtggagaattgttcattggctggccctgtggtgagctcttcgatccaacagttttgatgaaacatagacatgctcatctctgtttccagggaatattagctctgtgctgctggtggtagagctctaaggaggaacagtggcaagtagggtagatataaagtgagctttcatggaggcagtgacatttagagcaacacagtgaccactgagtagcattatgtgaaaggcatgtcgatttgtgactgcaggggacatagtttattgtagaatgttggggaagtacagaaaagcataaagaacaaaaaacagctgtattgcagccatgcaggtgaactttggttgtatatctaggtatttattcagggtatttgtgcagtatctcccgtgggtcaagtgctgggatgcatcagtgaccagaatgaaatacctgccctcatgcagctgatgtcctagagggagtagaggaagacaggcaataaatgagtgatgaatcctacagagaaaaataaagggagaagggcagtgccagaagtaggagatcatgggggtggaaagaggagtttggtcttcttttaatagctagtgaaggaaggattcatttgtaaagggcagctgggcagagatctcaagaaagaggtagtaagctatgtggatatctgaaggaaaaatatttcagataagaaaacagcaagtgcaaaggccctgaggcaagaatgtgcctgaaacgttgctgcagcagcagatcagagtgactggagcagagtgaaccagaggggagagatggaaagtaggagaagcaatagggtcaaatcctggtcctggaacatcttcccttctctgtgggatgctgtctttatttatgtatagaaccctgggtaggaatgccagctgatatgtggaaaataatggaaaatgtcagtttgagataagggaggtgacaacttccacggccttggcctttgtgttttcagttgagctcatctacatggaggcagtgtgttgtgatggagacagcatgggtgttggaattgtaggacttgtgttcaactcttgactgtgtcctggccagccctgcatccttgggcagatcacttagcttcttggatctcagtctcttcacctataaaacgtaactaatacagggtttttgagagacttataatgcacagtatgtactcaatccaagccattttgcctgtatctattaatataggaaattgctgtagtttttctcatgatggaaataaatatgatctagtacagctaactctcaattattttttcttagatgctgctgtttcatctagtaccatatggttcgataaagaagccaaaagacatatgtggccatttaaatttaaattcattgaaattaaataagattaaatgctcaattcctcagtcatactagtgatatttcaagaggtcattagcccagtggctactgttttgggcagtgcagaatagggaccatttccagcaccactttttgagatggagtgtcgctctgtcacccaggctggagtgcagtgctatctcggctcactgcaagctccgcctcccgggttcatgccattctcctgcctcagcctcccgagtagctgggactacaggcgcatgccaccacgcccggctaatttttttgtatttttagtagagacggggtttcaccgtgttagcgaggatggtctcgatctcctgacctcatgatccacccgcctcggcctcccaaagtgctgggattacaggcgtgagccaccacgcccggtgcatcgttgaaagttttattggatggcgctgccctacagcaagtgtcaagcttctgcttattccgagctcttgtctgtgtatagggaaagtggtattacctttctttatggtagtattcatgattcataccaggagcacactcacactggggaggggcaaggtgggatttcagagccccatgacaggtttcctgaatcagaatttctgtgggtaagtcccagggatctgcctcttttttttcacttcctctgtgattctgatgcaggctaaagtttgagatttgaagctctagagggcattgtcagaatttattaaagcatgtagtccatcctaaaatgctcagatgatgcaagctacagaattgcagaatattagtactaattgcatattgctttggtggatcactttccttcatcatggtccacttgagattaaactaatttgttgggctctgtgaactcccctggagacagcatttcatgtgctctaataaaagctgccaaagtcttatttgtgctttcaaaatattcctgaaataaatggtgctgtgtgttcgtttattagatttatttaaagaaataagcccaatacccaatggcctacaatgtgcatcaaaaaaaaaaaaaaaaaaaaaaaaaaaaaaaattcaacaaaccaactgcagaattgaatgaaacagcagtggccacagttttcttaaaagaatgtgccagatgggtactggtcacaggggattactagtgaccctagtaataaacaagattacaagaagataaacaagattaaaatgaaattatttcttactccaaatcaggattttccgccgtgtttgcagcagcgactctgagggaaatgtggcctgcaaagagtttactgtcatggtgccagtttcgtgtttgtccagtgataaatcagtggatttatgggtttaattacctcttattgccaactcccttcctatctgaatatacgaatttaaaagttaggatgtgtatctacaggtagtaaaataccattttgttctttctcagtggctgaatcctgtatggaatgaaaatcaaaggaaaatcttaaagatgcgtcagtgcattacgctgtagagattcatgtgcagaagactagctggctatgcactagttctgtcctgggaagggcttcgttctaacaattgttttctctggaaggtgatgggtgactccatcttttcagatcacatccacacccatggtagctgccccagcattttggtctggctcctccaactttttttttttttttttttttttttttttttttttttttttttttaactacaccagtgaatggacagcatagggttttcctatgaaaccaagctccttccttttctggatgctgagcaacacttttaggggtttagcttagggtagttcccattcgaaactctcctcaggggtaattaagactgttcagcttcaccccctttagtctgcagtttcttgctttggaaaatattccttcctcatccctcatccagagacctctactgtgttaggattctcatggttacacatgaatgaaatttagttcaggctggcttacatacaaagccgagttattgttccctgtaatttgaaagttctttgttggacttcaggcatggctgcatccaggcttgcactcgctttctcctctctcttggctgcagctcctttggcacattggatttattctcagagatgcttttatcacatgactgggaagatcttctctggcagttccaagccagcctcttcctaatagggccatgtggagagagaaccctttctctctggcatccacatgcaaacaggaagggtttttaccaagctgtgaaggtcatgcatccattccttgatgcattgctgtggcaaggagtgtgagctcacagtggccagcctggctgggggtgtggtcagccatgcctggaccttacgtaaatggtttgcttggaagaagggggaagcctgtgggacagataaaacagaggtcctctccaccactccaggcagggcatgtccaagcctcccatcagctttcatttgcatggagttctcatagctcagcttacccctctccttgctcaagggagctccgttatttgctgcatttggttctagcctggacatataaagcagtcttataggtgtgaactcctttgcccatacctgacctcagttgtggtggcctcctggagttgccatggaaacaccatgatgtcagggcctgttctgattctggtttgtaggacctgggagatcttactgacctttcaggtgaaggaattacacacttgcaacctgcctgtgcccctccctggctgtgtaaagttaactcttttgagcctcacgtttttcatctttcaaatagggccagtaatcatagctagattagaggactgttgtgagaattaaatcaaatttgggacagagagcttgcttagcctgttgcctgtcatgtggttggtgcccatccctggtggctctgctcctccagtgtctgtctgctcttttctgggctggcatgcatgcttctgctgaggcagatggatggatttcctattctatagatcaccaggtagttcagggaggtggtcaattgtgctgttaagcatgtgggttctggatcaagactaccaggtgaatctaggctctggcttttaccagctgtgtgtcctcaggccaacccccaaattcctctgtgcttagttacttcacttgaaaaataaaagagagagtaatgaggattacatcaattgagatgttttatgcacttggaaagataccagcacttagtaagcgatcaatatgttaattactacttgtgccagtactaggcttcccttgtgcctttctggctttccagacctgtcagggttgagactagacaagggccccgcttctccctaactgtgggatgtacgccttcagcagttcacctggtattaggaaacctgtccgttctgccatatgaaggtttccctggaaatacctttttctggctcagagtatttctttatttacaactaagcagtggcccatgtcaatcatatcaagacatcagaatagcctgtttctgtttcacttatttctcaaacctttattaaaatgtgatacgcatgtgtgcaaagtacatgaatagaatggacttaccacaaagtgagcacacccatgtaaccatccctgagatcaagaaacagaatattactgttactccaaaagcctcgctcatgctcccctaattgtattctcctcctgactcctttcacctcccttgtttccaaaggatactgctgttctaacttttcatcatatgttagttttgcccttttttgaactttatatagatggatagatggactcacacagtttatattcttctatgtctggccttttgtcagtcactgttatgtaggtaatatcatctctggtaatgcatagcaatttttttttatgtgtaaaattcagttgtgtgaacataacacaatgtccatttgattaatattcctggtggatatttgagttttttcaaatgagggtaattttgagtatttctgcttatgaacatttctgttgagatctttttgtattcctgtactcatttccattgggtaaaatcctagggttggagttgctgggctgtgaggttcatgtgcttatcttcagttcctattgccaaacagttttctgaagcagctgtagcactttaatgctgccctcctgccagcagtgtgcaggagttccagttgctccacatcttttcttatgctcggtatggccattatcttttagtttttaggcattctggtatattttggcctatgggtatcctattttgtaaagtgcctattcatactttctgtgtcttatttttaattggattatctgtctttttcttattgattggtataagttctatatgcaagccatttgttggttttaagtgatgcaagtatcttctctctcactatgtggcttggcttttcactctctttttggtgtttttttgaggtgggagatgctttatgaattttattctttgcatgctcattcccgtatgcattttaaagcaagatctgggaaaatgtggttttcctcctcttgttgagcaggatatacagctctaatggctttgttctagcttcaaccaacacatctctagctgggaaacttgttgtctttctcccctgaattgctgcttctttatgataaaaaagtaccactttctcccacctttgcctctggcttacatgttagacctctttttaaaggactcatttccactgggtaaaatccaaagagtcactgactctttggatcatattttagaccatggaaccagaatgtgccgtgttttaaagaaaagcaacaagccaatcaagtatttcctttaaccattttcccttaaaatagttatatgatgagcaggccttggaaagaaaaaaaggaggtaagggttaaaatacatataatttataatcatttattaaacaagagtattacttataatgagcattcatcagtcctttagctaagcacattacatggattaactcattttgacttggtaaactctatgaagcttgcttcattaataacctcatttcatagattggataagtgaggttcagttcatttctaaggttacgtagtcaataatcttgttgaagccaagactcaagctgggttctgttggaccccatagctcagtactctactgcactgctctgctggtgaggatgtatccttgctttttgcagtttgcattaagctaatcaaaccacatttcgagctttctgctatgaatagttcagtactgaggaaaaattgggtagcttttccttccccagttctccatcacagaaataaatcaatgaagtcaacagtcaccttagtggcttttaaagttgtttactaaaacatcattccagatggcattgtgtcctgttcccctggtacagttaggagagcctggaggttctggataaaccgtgagggacttcaataaccttgcttagaattctgtatgtaaaaatctttgtgagtccagattttccatctaaatgtagcctggtgtccaggcttggcagcaaatgactgccaggtctcaggaacctaggagaggctagcgatttgattctctggctgcttctggaccctctctgtattcactgattaaagacccttgctttataccccactggccaattgttcacaagtaagagggattcaaagtagagagtgagaattggctgtgcctgggaagatagagcctttagaaggggaagcattgtgtaggattcaggacactgtgctggtctttctatgttgtgggcagcttattgtcaagacctgggacagagttaggattgggtatgtccaagggttctaagtctcttagattcttggcttatggttggaaaggagaataggtatgctgccattacttgttctttcaaaagtcagtagcagtgtgcattgagccacggaactttaccaaaattgagatagaagctgcctctacattgtggagttgtgtgcattgaaggagaaaatcacacagaagctgaggactgtgcctggctccctgttgctgagtgagcaccatcaatgctcttgggaccataacagtggtgaagttaagtctctctggaactgttacagctcacttatttgtcatttggaggggactcttgctgcttcccttctctctttaaccagagggtcttttcttattgtccttcttcttgattattgattacctcttgtaatgggacttccctttgcatttaacttgaaaatagtattttctcaattttatggcttgtgacttctacccgcccattgcttctctccccatgtaggtaccgcctaaagcacaaacagctgttttctgggtaattttccacattgcatttagcagtagtgaagggctctgggaatgattgccctagcctgaaccagctgtccatagacacaactacaatgacagcataaaaattggctgtttaggagttcagagcttagtaattgcagggagcaatttgctttctctcttcactagtgtctatctagagacaattgcagaaactgttagaggcatctgagaaaaatcttgtccttaaagttggagattaaaaatggaaagtgtagtttcttccatttgttaaccagtgcctatcaatttcactaaatttttgccctctgcaatctcagggagacgattctgagtatattttttccagttgggtaggatgggggagaacagaagcctcaagggtgcttaaggaccctttgccagcattgtcactgcaaggaagtctcgtcgagccctgaggcaggagcatgcctctgtgtggaggcgcttctggtggtgtttggtttagtttgcctcctgcaagttatgaccagaaggtctgagtctaggaggaggggcatgatgagcaggacatacagtcagtcttgggactggaccccggctgtcttctgacagggagctttagggcagaaacagtttgcaccatggcagccaagtggggacttgtatgtccccataatgcttggctgatgactttggaggcaatggtctgaagaactgtggcctgggagcttgcaggaccaactgaaaagcagtgtgaccctgggtgccacctatttttcttccaggttaacagtgtgtttttgttaaggatggcacctgtagaatataaacatcaagatattagggaaattctccagcacctcctgttgccttttaataagctcttgtaaagtgatcactaagagagctaataattgttgaactgaatagaatttgtgtaactcttcctttaaagtacctgttttccactgttaccttttgagataatgatgtaggttaattcatactgtgtgtgaaacagtggtctatttgtcttcttactgcaaaattctatcctaaggttgttgggggaactttgttctccttgtggccgagacttggtacctgggtccctgtcactggcttcacctaccaccctcctgctctgtgatttgacacactcagactctattctatctccctttgctgttctaggctgcagtctcccctggattttggtgaggctggtcctccctcattctgcctccctgggaggtacactagcagggctgctgcagccaccatgggcctagtaagaaatagaaggaggggcccttctgggtgagtgcagacctgctccagggtgcttggttactgtgtgcagtgcagatgggatttcagcctgcgttagtttcctgacctggcattcttgttcagcgagtgacctatacaaccatccatggcagccctgtggactctcgtggccagggcaacacatagatgttcaagaaacattagttccctacatcccttcttactcatagtataaattcactcttttctgagaagagagttgccaaatttagaatgtttttgaggccatgtgatatagtgggaagtgtctgacctttaaaaacgaatggacctagatttagatcctgtctggctttgtgctttgacacttagccaagtgtgtgaactcaagcaggttccctaacatctcagcacctcattccctttatctttaaaatggtaaaaacagcattgaccacctagggtggtgaagaacattaagagatgtagtctgtttagagcaggatggacaaactcagcctacaggcctgctccagctgaggccagctagtttagaatgatttttaaaggaggggttaaaaagaagatgaatgtgtgacagagtctgtatatggcctacaaaacctaaactatttactatttggccctttacagaaaaaaaaaacaattgtgctgacttccactttggagggtgagccctgcctggcacagagtagtggctctacatgtggtattctcccctcttacaaatatctccctagggctcttccatgcctgaacaattggtgcaaaaggcttccattaccaagagcagacacaaaggccaaggcgaggctgaaatgcggatctattcaaaatggaatgccatggcagctccatgtttcatgtctttttcctgtctttaagtagaaacctcactgaggaccttctgtgctaatagttaccacaggtgtgagtggctcttgatgatttctaataaataaccatgtttaagctgaatatgagtgggccatttttctgacggtctttaaactggttatttattttcttggagaaatctaacccaaaatggtttggtaatgaactgctgctgttgttaagggacttgttcacattacagtgagggaaatttatgtttccaggtagattttagctgtgaaagattcaagaataatgtggtcctctaaagagcagagagacaatgttaataacacaaaagatctgtgctgctgtggttgagcatgtgttcataatttatttaatattttctccagttctgtcatcaggtataatcattgtgtggaagaagaatgcaaggaccagcaggaagacaagcaatgaccaaaatcaaatttgcatctaattttagtgagacgggccccaggtttcttaacgtgtgtgtgtctgcgagcaacccgcttggctgttgggcccaatctgtgcttgcgctgctgctggggacagaggcacattagtctggggcaattcacatatcgaactgtgggctgatgcacattagcgagttgttctccatacattgagaactggccctccccagaacttgtgtaaacaaaagctgtatgagcgagacttctgctttatcctctgcccgctgcccatctctacccaggagccatgcagaggtccagtgtcatagcaaggttggtttgggaccagctgttccctcatcttgtagttcccagagcttccctcacagtcacagaacttgccacctctttgaacccacccctcctttcccaaagaggagtcatttgcacacaggtgttagtgcgcccagtggaattcactaaagattttgtgtgggagactaaggatgggtcttacctcacacactccacaacagacagtctcaaaatttgtaattaaacatgtattttctcctttcatgaggtcactctgccacccgagggcccttcccatggactggctttctcctgaccttactctagtgcagagccaggcccagcaccttcctcgtccttccgtccgcttccttccagatgtctcttaggatttcagttcttctcccctctccttctaaatcctgtgttcactcatgttttagcacagaaagctcagtttccctgggctttatcaagggttgtctttttccttcaaaagaattgttagttgccaagaggagtcataatttctccatgtagcagctttgattcaaccaatacctgttctgagtccctgctggttgtatgggtctgagtcgggtgcagcagagttcaccctttgggagatgatggtctagaacttggtggaatctgtagccaatttggggcagtaggctatcgtggtgcacagaaggagcagttggacagaaccagatgtgactgctggctcttgtgtttcctgcctggtgtcacctggaacaggttacttaacttctctgagccatagtttcctcagctacaaaatgtagaggccaccatcatccttgcaaagtcattgtgctgatattgtggaataatctacataaagcacagagtgcggtgcttggcaggccatggatgttcagtaaacattcatttgcttcctgttgtaggtgaacacaggctcaagttacagtttcttggtttctgcttagaaaatggcaaggtaccattacctcctctaggacctgggtccttgctctgctgcctactgggcctatttcaggtctgtagtagaaaatgttttcacatcgactatgctcattttcttggtcactgtctcttccttgaatgctatttgcagaatattttcattcccttttacctctacactagtttttttttttgtttgtttcatcttgtttttgagatagggttttgctctgtcacccaggctggagtgcagtggcatgatcttggctcacttcaacctccacctcctgggttcaagtgattctcctgtctcatcctcccaggtagctgggactgcaggtgcacatcaccacacctggctaatttttgtattttttggtagagatggggtttcactgtgttggccaggctggtctcgaactcctggcctcaagtgatctgcccacctcggcctcccatagtgctgggattacaggcctgagccactgcgcctggtctctgctagttcttaagtgtcctcactttccatccttttctgactgaggccgacaggcatgccataaattcaggaggcagacaccctagtagaagtttgtcacttcaggcttggatcacttataacatgtgagtgaactgggagctgaggaaggatccaggagcaagtgttgaggagcaaaggtagggaggaagatcatgagggcacagaagctccactgggaggtagaggcaaaaggggtagagtctccaaggataaaccttaccccaatcaaagatacccacttggaggcagctccgtccccaaggaaaggtggcaggtgcctcagaggatcagatttaacacgaggaactgagcctcgcatccttacctgaggactttccagcctgtgcccctgtagatgcccacatctgcactgcacacttgcagttggattgtgaagtggcttctccacaagttctgtatctatccagagtgtaaaaggtctaagcacctaatgcatctgcagtcagttcttggcacttttctgggcagctttagtcaaatgggaacccctgggatttcagagccccacttcagagaggagctagagtctagtgcagtatttctgggttttctcctttggtgcctggtctggcactgggcactgctgagtcaaaagtagatgataccatagcttctgaggaggccaagtctcttcatggcagggaccgggaggaagaaactggagattttctctggcccaaatgatgttggagagtcccagcatcatttggaagctaaggaagggacctttaatggctgactttgaacctggcagcttttctccaaacaaacatttctgtttgctttatcaccttattatgaaggcatcacctccttcctgctgggtctgttcccactgatagcaggagtgtgggcccatcaggatttgatgtagacgttcctaggcaggacgcctgcagacagctggatggactgcagtggcagtcaacagataatgagaaatccatcacacatgcgtgtttgcttgcagctctgagctgcataccttaagctgtgagtaatgtgattacttaagtggcattttatttacacttttgcacagagcagcggctgccgcttttccaatgcagctatcacccagatttgatttttaaaaatctcctcagagtcagaatggcagcatcacaaatatactaatccagaggaaagtagcggtatatttttaaaactctgttatcagcgtaaggcagaggatatactggggtcaactacaaaatatagttaccatttcttggtgcatcctatgcgctgggtgtttggcatgtaagtctcaaataatcctcccgttaacccgatagagtaggcaccattgccctcattttcagatgaggaaactgaagcctaggaaggttaaatgcttgtccagagtcacttaggcaatggcaatagaaacatcaagaaaagttaccagttaaaaaactgccatagctgttcatatatttcatgttttagaccaggaaacagaaccgttaattttagctccaagctgggctaagagctgagttttgtgaagagaggtgtgagaaacggacatccgaggctgtgatgggcagctcgacaataacccacacggtattgttcccaaataattccagcaggcagccctgacagggtgccttcagttctagctgtgacttgtgtgtctcgctggtaaattagatgagatagctgagccccgaatgcttgaacaaatcgagccacaatttggatcttttgcaggagctgtcaccgccttgtgggtaaacgtgatttctggggctttctcctgcatatttctggcatgggccatgggctatgtgttggtgggtgagctgagggtcactccttgcttatttcagatctttcatttcttaatagggtacagaaatgccaggacaaaagaaataaatgaatgggtgacactatttgccatcccagaaacaggctaattataagggtttgtggttccattcagctgcctggaaacattcctggactttagccatgatcatggcccaagaagctcttcatttttacttctcatgtctgggatgtagatacttttctcagagtctatgccactggtgtacgtggaccttatactgtagattttagtgctatgtgaattcatgtaaaaatgattttacttttctgggctgtagtttcccagattataatgttagggtgatgctgtcttccttatacctaccccagagggctttaaatgaatgagtcaatgattgaatgaataaataaatgaatgaatatatagataatatatgaatttaagaagtaatccatgttttttttttaattgaaaagtagtaaagtagaaacaggaagaaacccttcatattcccataactatctttaccattttgatttttctctaatccttttctgtattcccttctcttcttcttacagtgggtcatgggcactatgtaaggatggttgaggcttccagcacattggtggaggtgtctgtccttcctttgcaggcctctgagcgctgggaggaggggattggtgcaccggggctgtgtttacaaggtggatgaagtaatcactgtggcatctttagtcttctttcatattgtttttctgttttcttctcatgtcttcctatgtaactttcccctagagtcttcgacttgcaagagaatgtaattttgccaaaggatttggtcttggtaatttgttcaagagattctgttttagtagttctgggcatcatgagaaaaatccaactggaatctttctttaatattcataagttatttaacaggaaagggatttttaaagatctaggacataattactgtttgtgttcatgttaggtccttaaaatttggaagcaaaaataaaaagaaaagcaaaagcagcttattgctttagtctgccttgtattctttcagtgcattccagtccttgctagtctgaaaattgctcctactttatttacacagagcttttaggcatatttgatttatcatttgacatgtttagaatcatacaatgttaggactggaagggacttgcaatgttattaacattcctattgtttccccaaataataaatgaaaacatagaagtattatatgatttctgtcagctgggtgctccttacaagaaataaatatgtccttattgatgtgtattttttttatcatataaatgatcttacctgataattttaccctggagagtttttattttaaaagatgggacttaggaaccctggttgttcctcttccgcttctctagtcccctgcaaactagagtgtgacctttcaaaggccgagtgagagccagaggccatgaatcatgatcactggctgtgcgggggacctccagggtcctggtttcatgggcacatggcatggccctatgagctcaccttcagagggaaagatgtttacttatttaacaaaggaaaggtacagcaagctctcagcatgtctctttaggagggaaagagggcaggcagaagactagttggttttaattatgcttcataatgattcacacatgtccataacaggtggcatggcaaaacttgctgctggattggaagggccagggtgtgagcttgcttcttgtcccttgggtggcatagatacagtgtcatggcttagccttccagctaaagtggagggattgtaattgtcatatgcattatctccggcagccagctgcagtagctacagagtttcctagtcacagagcaaagggcagactgagaggtgcaggagacactgagtagagctgccagcatctcccattgtctcttctctgttgttgcacctgggctcatgcttcacggccttttgtcatagattaaagctgctgcggcaaagactgcatgatcgtgcacctgccagatcccctgaatgcaatgtcctctctcgctccactgtgtgtccatcctctggaaaactgtccttcaagaactagcttcagtggtacttcctcagtagaatcttccctggttctatggaataatttgtgacttcttcctctgtgtacccatagctaatttttctaagtgatagttaccaggtcatgttatgcttaatctggttacctttcttgttacttctcctctggctagaccatgggtttcaagagggtaagggtagttgttagtcttcgctggtgtccttggtttcagttgggctccatctaatttgtcccacacagagagagtgcagtatgctttagaaaataccagtttggtggagtcaccctccaaataagccctccaggggctccccagtgcttataggttagatctggatgtgtcatcgggcattgaggtcctagagcctttgatctccatttctttcctagtcttagcctcactctgtctctgtgggtgcccaggccctaaataagcgggaccagataatagcattccccctggggggaagtaggacagccagttgttcatggcatagactagtacattggtcctcaatagtggggttaggactactatctggggactcatgtgcattgctcttgttctaaagacaattctcttgtaggttctctggaccatccgtcttgtccacatgacatcagtacgtcatctctctgtccaaggggtcagctgagcaagttatgaagagtggagcctggctgaagtgcctcgtggtcatttgtttctatcaggcatctttctgtcagtgctggggaggagaaattgtgttacaacaattacagagttgcgtcagtgcctgttgggtaacaggcagggtagctcaggactccttgaccccgcagcctttgggagtgtgggttctgtggagagccttcagtcaatctcagaggactgttctacccatgtggtgggccctgctgttagcagtggctgttgctcagagaggggatgcccactcttctccatggaagccttgttggtgattgtacaggaaaactgtggctcaggaatgtgggtccatttgtggtaggcttgcctactctggttacctcttaccgtggggaaaatgtcacttccaaaattgcaaatttcaaaggagaattatcagatcaagacagcacaggcttggagtggacaaagtcttggactcaatttatttctggggctttggtgaggagcgtctgctgtgtaagtggatccaaaggctggagcctcaggatacagggctgcaaggtggcagctaggacagtcttagggacacagtgaaaggagttttattgctttctttcccagatgttccttggaagagaagctgctgaatggcagggctaggaggagccatagcatccctcactttgcagctaaagaaaacttcatgccaagcctgcagccatagttttccagagagatgattcatgctaaagccactacatcctcagcatggtgcttggatgttggtgttggatgtttcactttgcacagggccaccaggagtgctggtggtaaacaggtgtgagtgctcagttcagggcacacaaaggcaggagactcctgtgcatctcctgccggcctgctcttggggctgctctctttggggccaaaggccatgattcttcccagaaaaccatcttagtgaggctgggcctgagggtaggggtggatcaggaatccagggtgtcctgcctgctttcttggggcagacacatgacagatagaccggctgtccacttacttagagaccttgtgaagcaggtgttttcatcccctatttcacagataggaaagctgaggcttcagatataatgagagtcctggtagtggtagtgagaatctcttgagaggcccgtcatctgtgctgtcacctcccatttcttggtatctcctgtatcatggtgcatctccacagggcaggcagccccatgccttctctccagggtctctggtgttcacattgatgccattgaagcagtagtatgtagtggttacagcatgatcttcgaagtcaggcaaaaatggagttcaaatcctggttctgcttctcactagctgtgtgaacttgtatagtaattttatctctctaagcttcaatttccacaactataacactgagatgcttgtctcagatgattattgcaaaagtagctcatgcctgtaatcccagcactttaggaggctgaggcaggaggatcacatgaggctaggagtttgagaccagccagggcaatatagcaagaccccatctctacaaaaaatttaaaaattagctgggcatggtggtgtacacctgtagtcttaactacttgggaggatgaggcaggaggatcacttgagctcaggagttccaggttacagtgacctacaattgtgccactgcacttcagcctgagtgatggcaagaccctgtctattaaaaaaaaaatgtggtagctgctattattacgatgattactattaatattactattactttgatgttttgatttgggctttgatttgatgcaagtcctaaatcttgtatcagattttggctcagctgtggtgttccaaatcatgaagtcctcttggtccctgaggagactcagggcattagtagatgtggggtggggccattgggcagaaatctacctgtcctcctcctatggagcctggttgatccctctgagaccttccagtgtcatccccattggtttccagtttcctgttactgccccagttagtcactaaaagggagttatctatttcaccttcctcagaaacctccaggtcatagaaccatcagttttgagacaaaggggaagaagttgtggagctgcagtccaagatactggcataaaaaaccagccgaggttggattgttatcttattcattcagtagatgttagagtacctggtgccaaatgaatgctgtgctgaggttcggcagtgaggccacccagcccctggccctagggactgccgtctgtgtggctgagttgcagaggagtagccagcttctacagtgtgagcagttcagtgctctgttcaggcagcccagggggctgcagatcacacagcaggggtgtctcgagtgcagagggactggggacaaggaaggctttccacgagaagaagtgtctaaactgggatttgatagaggagtaaatgttaacaaaagaagggtaaggaggagtgtttcaggcacagaaggaatagcatggacagagttttggggaacgaagagagcataggctgctgcaggattaaaacgtagttcattggtggctcgaccatgtaagctagtgtggccataaggtgactgcaaggctcagcaggtgctggggcacagaagtcctgtgagctgggctgatgggcttggccttgacctgggagtccctccagcattttaagcaggagggtgatgtgaccagaacatccctttagaaggtcactattgaggcagtgtgaacagcctgggcagggctcaggggaggcagggaggctggttagggcacgtggccatgttgtgaggagaaattgtggaggcctgacccaaggcagaggagaggggagttgtgaaagagacccaggagtgcaagtgaagatgacttcgttgttgcctgaacggcagagggaaggaagagggaggagtccagcctgtggcctgggttcttgcctcagcagcaggtggacagaggtgctgtctaatgagctggagactcttagagcagcagaccctgaaagtggtaggtggatacaactctggaaagctccagaagctgggggagaaggcccctgatgttctgtacctggtttgctctccatggtgggcctggccttccctcagtcacctcagtcactgtgatttagtgtgtgacttcctatggaggctgcacattagaatcacctggagagcttttaaaacatcccagtgtggaggctacactccagccactgaatcagcacctcctgccctgggccaggcatcagagtttgaaaagccccacagcatccccagccatcagccaaggtggaaaccactgcttctgccaatccctgtgtttggtgagaggataagtggggagggatggtgaggtggtagttaatagctggtgttttattctctacaaggtagcatctggatgttcatggaggcctgccagctatggtgggggaagggagcaggcattctcagaaagatggctggacctaattaatttgggatttgtgatactcggacaaggctgggcctcaggccagtataatttgtactttctctgaaatgaaggtttacgtgctataagctataagatggcaatggctttgtttggtgtgccaaggagacataccctttcagggttcctccatctgttttctacatgtaaattaatgattacacagaaattttgcctgttcagagcaggttcaggtcccttatcaggatatagttaatcataattgaaactttaattaatttgtttacaattacatgataggtaatacctttcagtggtttaaaatgccacactcaatgcacaaataggcccactggtgtaagtattgtcttttttaatagatggggtctatttaatagagaggtgtgaccgaatcttagatagtacgtgtctgccctttacgcaaaatatgcctgtagctcaagttttcaaatttcattgattttttaaaaatctctcttcatacatgagactaataaaactacatgcatttaagtatttcataattattttttccagttgcaattggtctcccttcacttgggcctaattgacaagattcaaatatgcaagaattgcattattgaaatttaaaacatatccacaaagtctaatgtttctctcagtgttcctgggacatccccctactgtaaacctcaggaaatggacatgaaattgtgtaccttttatttattaattctgtatgccagatatcataccaagcactttgcatcattattgcaagtcattgcaaccatccttcaaggtaggtgcaagtggtcttgttttatggataaagaaattgactcggagaagctgagtagattgtgcaaggccacatagctggtgagtgctagagccagaatttgaacccacatctgcttcaaagcctgccatgtttacagtatcttctctgactttaactccttggtgctgacctattctttccttcctagatattaagaaggctgctcttggccagctcaatttgataattttgctaataaagtcaaggttgtggatggttttgagtctgaggagacaacacatgtcttggccagagtacaaatggagcatcatatgcccattcatatccccagaagaaaagcccaaacacagggcatattttggggaataaacctcagactcagttctttcccttgggaaaagaacaagccagtgggttacttctctccaccccagcttggatggactgaccaggacagacagaaagtccctaagaagagggagctctttgtgttggtgatgatccttgaatcagctagaggagcaatgacaatgctattcattttacatatttcctaggaacataaatccatatctttctcaggtttgaggacccctcaagctattttgaaactgcaaggcaaaggaatttctttgcagaaatgtagaaggtatactactcttggtcttggatgtcatcttggggtttttactgaatttcaccctttggaccaatgtcacaggcaattactcatttgaaattcttgtggatggtaatcatggctgagtgttgggatttaatcatgattttgctagctgttcggcagcaatgatatagatcactagaccacactcagatttcatcccacttcagttattctaccccataacctcatgtcctttcccatgaacttagtgaattgttgggaccttttcaaaggaatgatggtaggtgaattaagagagcatatctggatgacctttctaatgttatgataatttgaaaatttgatgcaattatcaaaaatgtatacatttcttcctattgtttgatgtgattcttttatttttttctcatttataatgctttcgtactcaggaagttgaggtaggtttttgatttttcaactgtatgtagacatagcattaaagtagttgccaaataaaatgtaaatttcattctaaatctgaaatctcagtagtaaatatttgttttagttcagtgaaccagtaccacacacatttatttttcattggtatatccaagggatgcaatttatcaaatgcatataaacagtccatttgctgctttatcttttctcattagttacagtacaagtatgattgtcagttattatctgtgttttactggtgggttatttattgaaagagcagagcaactgacattgttattttctgaatcattttgtctaagacctggaggactttaaaccaaatgtcagaccaatttatcaaagaattgctctattcagggtgaaggtgatttagagtgtgtgtataaacatacaaccacctgtacttacacacactagtaatagttatgggaatttcacagggatacagagatggaattgcttacaaactggaattgcttacttatatttgatgtgatttagcaaggatttactgtgtgctgttgagtgatgccttaggggatgtgcaggtgagtaagacccatccctgctcagaagcggcctaggcccgtgtgtgtgttggggggtgggggggtgggggtgggtgatttgtgcacacagaaatgtattaatgcagacaactcccaggctctgttgtacagggttctcacgagtggtagctttggatggaaggctgagaagcctcaagtcactgcccaagctgggtcacttcattcagaaggattctcactgaggctcctcaccagagatggggaggagacaaacagcaaattatttgcccagagatgtgaatgaaaacagctcagaggtagggtagttgtgtgtgatgctagctcctttcttaataaatggagtgttttgtaccttataatagtttgattagcagagatttccattgcacacaaaattacaggcaaatgtcacattatataacagaagcatttacataatggtctggaaatctcacttttctggtgacttctattatcatttcggggacatttctcccacccaccaaccagatcttcttcctattccccccagtcaagtagtgtgaagataaatagaaccagtttgcactgaattctcttgagagcagtttggctacagtcccttcattgatctctttctaaaggttgcagttttggtaaagtggagtgtgcctccatctgggatctacaaactcggttctgatctacttagccttgcagggaagtgcttctccattttgtgtgtatctgcaatcagcccacagacaactccaaaatgactacctgccctccttttaatttgcttccttcagtttatgtctctattgctccctcctggtcaagacaaatgaggctcccatttattttctaggctggtaatttgtattaatattatctcaggtaatcatcagatgaaacggcagggttcaaacagcttagctaaaatatgtatgaaggagaaacgatcggtttcatgagaactaaatgtgtttgatctgtagcatctgaagctgatacaattacattatcatcttcataattgggtgccaaggcaattgggttttcatttggttctgccaccccatcttttcctcagagtcagctttgacattccttggagattaaataggcacctcttgaaaggcaaatccctggtgaatatttgagctaaattgcatcagtcattttggggctatggtatagtaaaagaaaattcaggttcttattcaaaatgggctgttggctatgatcatctgtgatgaagagacttaatcacccaaattatagcaagaatattttgtcatttcatgttaagcagacttaattatttcattggaagatgcattatagagtggagtggtcttggcatatttatgtgtatgaaaaacatatagtaatatataataaatatatctttaataatatatattatatataaaatgtgtatatatgtatatgtaaaacatattttctttttcattgatgcttatctgaacagaatatctctaaagcattaatagttaaattcctttgcaccagccatcgagtgccaataatttcacaggtttcagtactatcttagtggaatatttaataagtgagataaatggagaaatatagttttatctttgttgatcagctgtagaaaataaaacaataactggagtcttatttgctaccagtctctgtttcttcctctcccactaacaccaaccctcctccttcatcctggacatggatggtttgtcactttcttaccatgatctttatggtgactttttaaaaattaattaattaattaattaattaattttgagacagagtcttgctccgtcttgtccaggctggagtgcaatggtgcgatcttggctcactgcagcctctgcttcccgggttcaggcgactctcctgtctcagcctctcgggtagctgggactacaggcatgtgccaccacacctagctacttttgtattgttagtagagatatggtttcaccatgttggccaggctggtcacaaactcctgacgtcaggtgatccacccacctcagcctcccaaagtgttgggattacaggtgtgagccactgggcctggccatgtcaacttttcatgagagttcctgctgccttggaatactatgtgattctagacctaagtcagtatgcttaagtttgggcctctgtttacatttacagggtctttcaggttttaacaatctctaaaaaagggttgaataatattcatttatgaaatgctatagtgaaatggattcagtctttcctcatatgggttagttagaatttacagcaagaccgttctctgtcctgtccagaagatgcctgacataattatattcttcagtgtaacccataaaatagacatgtagtaacactgccatccttcattcctcaacctgtggaatgcattaatgggagctattgaacttaaatgactatatttagatatgcatctttctatttgggtttatgtttaaaaattaactgttgctgggctccttgcaagtctttaaaaaagctttatcattagatgataaaattgccactcaaaaggctaactcagatagatatgccttgcctgacaagtttgatctatccaatatgtctttcaccacagtttgaattttaacaagccataactttattgggccagagggaaggtcagaggcaagggctgttaatgtcctgcactttgtcagcttcagggcttaagtgtggggcccacacagcactgggatcgtgccggggcagacacactacttcccagggtagaagtgatagaattattgacagcatagcaagtcatggggtctgttcatttcaggacaatgtaaaatagatacaatatgtttttatttagatagaaaataagatttttttttttaaaagcctggctctgccacctgagtcttaggccctggtgaaatgcccagccttggtattggtagggtgttggttcaggaccactgacaactatccttatgtcctttgagcaccccaatcgttaagtgggtctcagggatgaacaaattttcaggaggtgaagctctagaggagccattcttttttcttttgtcttttatctttggctttctccacttgagttttgactgtgcctcaccagaattctcccagacacagagtgacttaattgatgcagcccagcctgcttatactcaccgtgtgtggaagcccttgaacctagctaggacagtgtgcaggagtgatcacgtatactccagcacttatttcctgacatagactgcagcagtggctgctaagagacccctcccccatgctcagtgaccatcccccaagtgggctctggtgcctggagtccttcacatgtgttcatgatcttggcccctgatgtgaggtttcctctctcagctgcagccaaagcagtgatacacaaaggtttatcagctctggctcattggtttttgctttggcagtccactttcctgaggcagggcaaaagcaatcagatgcagagaatcatttttcttccctgcttggcctggctgggcaaggggttgtttgaaggactcattttgcataatgagttttcactcaaggtgtactttcacattttggcagcaattaggcagtattgttacatttgcaatgagctttaaatattctaatgcagatagctacttttggaggccttatacttaaaactgtgatttttccctaagaaataggtaaaaatggtaattatagttaacctgaaaaagtggcaaggtccagaagaatgcttcaaattccatccaagttataaaatatgttgaaatcattagggaatatccagttcttgagacttgctcaaacctttctttgacatcaaagagaatgtggcctgtgaaattaaagttaaaggaacttgtctttggttccagcccttccctgttggacacacagcctgagcttccaagggctttattagaacagcatgttcaagtagaaaatatttcacaagatttcacattgccattatatgtgatgccatcctctgtatgtggagagagcattgataaaccacagttggaaggatgaacggttgatcctttttttctccacttgtgagaatgagttcatcttgggttatctcttctgcccttgagaatagcagaaaatgttggtaacatggttgtctaaggctaagaacactttggtcatcaaacctagaaattgggtgctaaatttcctatctgccatccaacttttaacttaatatcatttaacagtggctgccgagtttctgacagcacaattccaaaagtttgggattgtatttaaacttataaatggggaaagatattgcagagagactgttttaaatttccttagtgatatttcatggtaaagagctcaaagactccctaaccagatgggtgagaaggccagttattctataaaactaaagctggagcaaagtgggcaattctttgaaactaaaaataatttagtgctgaatcctctggatccagaggaagctgtttatttcctaatgccttggaagatggaatcactggccaagaaacaatatgttctgattttactctaaagctagtttcctaaaatctatttaagggcctaggtgaactcaacaaggatataataaagctacataattgaatgacactgaggctgataaaattcacaggagatcgtgtcagagataaactgcatcagaacacagcatggacaataatttaaactaattgtgcgctttgatgtaaattagctttaccagaagagatattgaggcttcattttgggcagctttctaaaactgcagcatgcagactgcctgccaaaaacacatatagcaaagcaattgaatattaactacaaagggacaaatccttaaagatgctatgaggataatgtgcatgggtgacacctcttcaacttgcaaactgttcagttttgctgatacagtgggtgtgccaggaaacaatggggtcaaagtgctgatggggagaataaagggagtacatggtggctgttaggaaggaaagggttattaggagtggggaagaagttaacatagctgtgaagaattgagtgattgagatccttgcaattttaaagtaatgaattgcctagcctcagagcataaattgatgcaacccaaatgcaggaaagacatggttatgaagagaccagactggccagcctttgttttttcatctttccatacccagaacaaatggtattaagctaaatgtacgcctttggttaattctaacatttggaaggctgtctctttttaggttttgtgagtattgaaaaactggaactgtgcaccacaagatgcgtgtctgtatgtaaaagaaatgttgacagttgaattatcagctgttacaaacacagaggcttaatcataactgagagcagcaaggcatcacctacagtataattgatagcaaatacaccttgcacctagaaggtgtctgggtttatatgtcaaactaagaagagcagcgctgtttctatactgggctgaaatgtttttactattcccagtattgaatacatacggtttgaaagacaggaatttgaaaaggaaattgatatttttttattacacattaatgcctgttttgggaaaaatttctaagctttcagtgttttcctttgtgttttgggaggtgaaaaggaaggcaggtttttatgcagttatgtgagaagctttttgaactctgacctttgttttctattttttccttatataggatgattatttcagaaactggaatcccaacaagccctttgaccaaggtaatggatgcaatatttcttgctgtatagtctgtggtaaatgtggtctcatttttccttccttgcatgctgagttaatgttcccacaagggccagctagcggtgttattttattgactttggggactgaattgactggggtgatagaaattattttatcaaattggttatttgtctgaggttatatctagggctgatttaaacaatttcttttaattggcttgaccaatataatcattgattcgttttgttttaaaaaaaaagtgaaatttgattatcaaattaacatggtgaattgtggggctgaatgcagtgctttcattcatggaacagactatgcctggagatgcttccctaattcacatgagccataacaatgaaactttctttctagaaaaaggttaatcctgggagactgtcaagggtactgcgattttatttgttaaataacttcttcatggtttctaaatagaagcctgtttcagagttagctcgatgactacttgggtttaagcatggcccacagaaggctttctccacccccattcccccagcaagcatcaaaccagtctctcatgatagctgttgtaaatcactaacagtgtcctcctgtgagttatttaagacacagtgaggacctgccatgaatcacatcccttcccccgttgttccatgtgtggtgctgttgaaaatgatggtagattgcacttcatatgttcatatggaattaatgccaaaacacaatgaaacagtattacctaccacatctcaaagtgttcattcttctgagaatcagcttcagttctgtaatgtgagtattcgatgtgatcatgatggtcaacttgatacgaagaaatcgagggaggcattgacatgtgacatggaggaaggtgctcctttctgccctctgcttggtcagtttaatgggtcactacctctggactctggttttctcgtaagcaaaaatggtattaaaattgccatatatacatttatcataggctttgaagtagtgtaacaattttttcattcatgcatgctagcattctcaaacatttattgagctttcgctgtatgcacaagcaccaagccaggtactggggatagagaaaaatgctgtggtgcctaccctacaggagctcagagtggggagtagggaaataaatcagtcaataattgtggtgggatctgttaatggctgtgatgcaggtgtgttcagggaagcatgtgaatctacagatggagaactgtatatgtttttgtaaagggcaaggtgtccagcaaaaccttcctttggaggctctatctggactatacatatcttagcagccttagagtggtaacggaattattcttctacaatcctaacaatgactgaatcatcacaatgattcactcaaaagcatatgaaggcatttgtaacttagtttagaaatgttttattaaaagtgatcaaaaattttaaaactttttaataggataaaactttatctatgaagaatactggtagttaaagagcaacaaattccctgtctgtgcctgataaacaagcccttctgcaaacaaccctaccaggcttttgcttgcaaaggtaactcaattgacagtcactgtgaactgattctttttagctaagaactagaaataggttcttgtgctataaggatcaaatgttgcctaaataactgtcaaaaattactctttgccaaagcttgcaaatgaatacactctcccgagggaagacatttttacttttactaatgcatattggagaaggaatacatcaaggtaggtgtcatttgccacttgggatataaatgatagcttcccttggtttgggagttaacacagaaattttgggaaccacaaaatcaccgtctttaaacctgagcaggtaaacagttcaaacgaggatttttctctcctaggaatgatggcagctatattcagcagagccccatcctgttctctttttctagctctgcaggcttgaaaactgggtctgctcagattaaccctcccagaaaaccttatgactttatgggatataattaaggaccttagctgagtatccccactttgtacctcaggggtagctgccgttggctatttatatacagaaccatgaggagcacaggcagagctgagaatagccttcacttaaaatatcagccccagcagatgtcatcaattacattgtgtgcggctcaataaaaatgggaggttactctgtcagcgctgacaccacttggtgaaatataaaccacaggcatggaagatgtagagcgtttcatcttccagaaactaggagaattactgaactccagtggaagatgacagccaaagagaggagtcatttcctctcctcagctgaaaaaagaatcaaacatagttaaaatgggtttgtggttagggaaaagttttagtttgtagaaatggaacttgttgaagagtgtcttcagagtttcagatgacaaatatggtttaggatggggatggaaggggcttcatgatggaggtgggtgtggagtaggcttggaatatagagggagaggaggggaaggaaggcccagcatagagaattctggtaatagtgtagtcagaaaggtggatttgaaatgggttgaggggacattccataccaatcagccaaatttgaactttgttttcttggcagtggggtgccatagaaagtctttgagcaggcgagtgacatgatgagggcagtattttagagaatttggtttggtgacaacagctataattaggaacccaaaaacatacttgctaaatgatgtcactcctctaggactcttgggtaacttcttcatggcatcattcattgccttggagccctgggctctggctgtcaccggtggtcagacttatcaattcagctctccagcttgacctctgaaatgcccatgcagcttctgattgtcgtgttggtgtggtgaatagttagaagactcaaagtattcaagaaatagttacttagctgtaattgcttctctgcttaaagatatttactgaactttgaacaacagggcttcatggagcgagtgctatcatcatgtaattgactctaaggcagttagaagaaaagtatctcacctggtgctctccaatgatgagactcagaatgtctttaacttgttatctttaagtgaatctttaatgtttctgtcagtggagtataatggccatcaacttcagacttttctaagaattcttcctgagattagggtaaagtggcataagtagtatatccttttgtcttgtaatgatttaatgccaaatctcctcacagaaaggatggacaggagttcagaattgaaggcaatgattaactcaggtgagaaatttcgcttgtgaagtccacaaagaaagacactgtgcagagagagttgggcagactgcacagtttgagagagccatgggccaatgcaaatgggtttcttatcttgcatagtcaggagaaatgaaggcccccggatggaccttcagagggctggctgaggctgcagagctctggggtgattccagagcttttggttgcctctgccactttgccttgccagcaccttcccttaactggcgcctgacaaactcaggagcgcatatgaggttagtgcttctcagtggggatctgggtcagcaagatgcttccccaagaaaaccattgatggtcaaataagggacacacatataccctcatctcttgaagattcacatgctcattatcaacttaaaaaactctgaggcgtctttcagtaaagaaacccatttaacctatcattttccaaatttgcctgtgaccatattttcaatttttttccactacacacctatcagatactcagaggaggtaatgtatttggcatgatacactttggtaagtgcagtctggggtcttagggtttggagtcagattctccaagtttagaatttgactctgtcagttactagctgtgtgatcctgggaaagtagcttaacttctctgattctaaatcttcctatctgaaaatggcaataatgataagtactttcaacaatagcactgagaagatgaagtgaattaatatgcctggcatataggaagtgcttgacaagtgatcagcaagtcattgattgttttcattctcttcctatttagcagcctctcctggtgtctttcttcccattccactctggttttattcccttctccttttgttcctttctggtggccttccaagttgtgatgctctgaagctctcggagctacactgacacgggcttgtcttaactagtgttggggcatcgtactggtacactccagatccccattattggagctgaagaggttcaggctcttaatgtgttcattccttccttcattccataagcagttaccaaatgcctgatgtttaaatgcactgaactggataatagggacaacactaaggaagacgtctcttgggggacactcccagttatcagtcctcagagacatccatccaaggtcctactggggggtagggaagtgagtagagttggtctgggtaacagggaaatccttaatatgtcaagtgtttatacaggtgacaggtcagttttagttgaggtgatgttttttgctatgccttggccttatgcagtctgtgcctttggtatgtggaccaggctccctgatgctgtacaaccaacacttgctggtaacaattaccttcaatgcaaataataaaggtattgtcacaaagattgtatcttttgcctttaagtgagatgacttgatgagggtctggaggggaatgaaagatagaatttattgaaccacaaagctgttgtaaaaataaaataaaggtaatgctttggggattcattgaataggggatgaatatacagcaaagtgaattctaacaaggtgtttcaaagcttcctgactagttcttttagaagaagaaaatggaaacttatttatagtacttttgctgaacaaaaggattttttgtgcactggagggtttggaaggtaatttatgtatataaccactatactactttagaataaaattctgattacatgaagttgtctcaaagtgatggaacactaacaggttctctgctggagccagggtgcactcaggaaagaacctccccaatttatttggctatgaagttccactagaggagacaagccactgtaggactaatggctggagagatttagcatgggactttcctgagacaagtgggttcctttaaagtggaatcaatgaacgctttagataaagtgtatagacattggttttaaagatgatgctttttattctggagtgaatactaatcattcttccagagcagactggctgtagataaacctcagatgttgctggtgatcttcaaagcagcatgtgaacttgtagaaattgatctccagataaaaataaaactcaaagagtcaggggcccctttcactcatgctgttctcgtgaatagaagaaaagaaagacctcaccctttgacttccagtctattataccaagatcctgacaaactcaaatcctgaccaaagccctgaactattttgaggcaaaaattctaaaactcaaaaggagggagttcttttcatgttccagctgtgtttctggaaccaccagcccagtggattatcacagcatttgtgttttgccaaggtcttaaagggtgtctggggagtcaagattgcttatttctaaaaatcttccatagaaggggagttttccttctctagattaatctgaaaatttacataataggcttaatagaaatcttaagtccccatagctttcttcataatgtggagtttagcctcaccctaaaagaacctctgattagcatttatagggccttgaaagtttttcagtttttttaagaatttgttcaccttatctgatccctggagctgtggattttcagaggcagctggcctcgtttgtgggaagcatcttaatacttttctcctggctcgctcatgtttggtctggttggtttctccctctcacctttgccttttccacataattaggaatatgctttccccaacagcaactactcatcttattcacattaacctgctctctgccccagacacgcacactcggctccagcctaattagcctgttcccactgccatcttttcttctgtttcttcattgtgacaataagatagtcctatttaaaaaaagtttggagtattgatttttaaacattctaattcagtactccagggaagaaacagaaagctattaattcaaatattagtatgctcctactttaactcagtctctctgccttgatgtttgatcaaattgaatgttttctcttttgtctttgtctgcctttgcctgtttgcttattttagagaataaaacatcagctataaaatttgaatctcatgggtgccccttcttctttcccattttcttttctctaaaggtgaccatatcattaatttgcttttctgttcatgtccttatgtttttatgtcatgtatatgtatacaggcaatgttacattatatattttacaatagaaattaatgtttccctctctaatctgtttattccacttaacattgcttttgaggtaacttttttgatagttgtagatctaatgaattattttatattgtgctattctattgtattaatatatcacaattaattcaattattcccccactgatggatgtttctcttgactccatctgttttgctattggggctgctttttcttagtatttttaaatgtaaactgcttggcctgaagagtgcgggatgccaggaggagggctgaggtgggacatggctctgccactgttaaaatgtgcaactttgggcaaatcacatgtcctttctggactttagttcacccatctctgaaataaaaagggtagatgagatagttgctgaagtccttgggagctgtggtagttaagttcaggcagaatagttttccatatatgttttctcataaaggaaaaatgaaaaatttgaagcatgatgctcttatttcaaaggttacagtttggctaatgagttatgaatatattgtaactgaaataaaaccaatggaattaaatgggccttttaactatcgagggtggagagggctcagaataaaaagaaaaaaggccaaagaagtctcttcctacagaatcctatgggacactgtgagctgtagaggaaagagcaagagttgaaagtgctcaaatcaaatcttgcctctcccataagcttattgtatacatttgagtcatttgacttatctagcctttgttttcttttttttttttttttactttcatgtgtctttacttttcatctgttttcagtgtttttttattattattatactttaagttctggggcacatgtgcagaatgtgcagggttgttacataggtatacatgtgccatgatggtttgctgcaaacatcaacccgtcatctacattaggtgtttctcctaatgctatccctcccctagttccccatcccccaacaggccccagtatgtgatgctcccttccctgtgttcacatgttctcattgttcaactcccacttatgagtgagaacatgcagtgtttggttttctgttcttgtgttagtttgctgagaatgatggtttccagcttcatccaggtccctgcaaaggacatgaactcatccttttttatggctgtatagtattccatggtgtatatgtgccacattttctttatccagtctatcattaatgagcatttgggttggttccacgtctttgctattgtgaacagtgtcgcagtaaacatatgtttgcatgtgtctttatagtagaatgatttataagcctttgttttcttatctgtagagtgggtctaatcacagctgtcttgtaggccatttgtggagagatcatgtttgcaaagggccaaggagtaggtatgtggtatgttctctacaaagagcgtttcttcctgctcagtcagttctgtcaggaactgtgtaggttccatttcctcactgagtgctggggtcggctatgagtttgtgttctggcttcaccctgacttcacaaagggctctcaggactctgtgcccctagaaccaaggagcaaaagccattctgggttgtgctccaccctttggagggaatcgtagtgaatgatgaagggtggtaaaattctccctacaattatggggcactgcagctttctaatactgtgtttaagaggttctttcagcacgaacgaatccattttaaagacatgtttattacctttccccaaactcataaaatgtggtgttagttgtataaaaggagggaaaaaaccttcctgttaatccacctgctagaacaacagtccctgaattaattatattgtacttgttgagtcctaatgaaccagccttggtttgggaaaattctcaatagggaaaaaaatgtcagctgaattttaaaatcaatcaataatgctgttaaatttttctcatttgagaatgtagaatggattattgcattttcccaatcaggaaatggctgcttggagaaaaacctgcaggcatcacctgcgtcctctacaactttcaggcctgagatgggggttttgttttgttaagctcctcaattgtactgtgtagcaattaactgctggaaacctgttaaatgttcattctgccccagaaaccatgcctgatgaaaggcaatgcggtatagtggaaaggccctggggctttgcagtctcagagaatgggttcattttctagctcttccctctaatagctgtgtgtacctaagtgggtacctcagttttcttatctgtaacatagaaattatgacatttattacacatgtggcatgaggggtaaaactcctgattcaatctcagaatgcacatgaaaaaggcaagaaagctttggcaggagatagagtactgctgtcttcttctggtgtttcatattgggaaggatcttagtggtttttgatgtctctgcctattccacaagggtgtgagctcattgatcagttaatcattgaatcaagaactcacagacttggtgaggactgtggaggggagtgtgacagtgctctcctcagggggcttgtggtctacagagccaagagacacacacgaaataaaatcactcaaaggatgtgtttgaggtgccctgacagaagctggcagagttggggctcaggccaggaattagcccttcctggttgaaggtcaggaaaaggatcctagaagaggtgacctggggcctttctgaagatgggcagatgtttggaggtagagaggaaggggagcatctggtggggagaaatgttttttgatagcttatcgctcagtgctgcagaagtgaaatctgatcatgctttagtcctttggggcttctgttctaacaccatagaccgggtggcctacaaacagtagaaatttatttcttacagttctggaggccagaagttggagatgagggtgccagcataactgggtgctggtgagggccctcttccaggttgtggatggccatctccttgtgtcctcatgttgggggaaagagagctcgagaactctctgaggttcctttgataatggcactaatcacatccaagagggttcaccctcatgacctaatcaccacccaaaggccctacctctaatgccaccacattggagaaaggatttcaacacataaattttggggggggacacaaacattcagttcaatgcagatgggatgcttcttttaaaaatacttttgttaagagatatgaaggaaatgtcagtcattactttagtaggctgtttcactttttccctttgtctctcaagtctcattctgctaggcaccttgaaacacccagagcaggattgcagatagcaagatgggcctgatgcagtaacactgggagtggtgggactgggacaaactaacacccatgccactggcagagagcagccctgacccaactctagctgacgatggttatgagggcttgggtcagcattgtaaggactacggattgctcaaaagcagctggaaatgaacatttgtttttgtgtgtgaaacttaattcttcaatgctggaaaatcaattattaaaaaaatacagcaagacggtaaatgtgcctttgggctgtttgtggcttctcttcttgtcttttgcttgtggcacgcgtgcgctggaggttgatgcgtccttggggtccctctgacttggtgcagctgcgtagcccttggggtggaggcagtgcctcgcagagttggggacagactgcctgagcagaagttgtctttgttgggactgtgctcagagaccacaggagcctgcagtggtttgaatgtgttccccccacaagcatgtgttggaaacataatccccaatgcaataatgttgagaggtggggcgtaggggagctgtttaggtcatgagggcttcaccctcacgaatggagccatgcctacctattgtaaaaggacttgaggctgtgagtctgacctcttgccctctgtcaccatgtgatgcctgcccccatgtcctgagacaacaagaaggccctcaccagatgcagccccttgatcttggacttctcagactccagaaccataagccaaatacatttctgtttgttataaattacccagtctatgatactctattacagcagcacacagtggaccagtacaaggcctaaagccacttgtaataagcctaagagcctgaattgctatttctgtgtggcctccatcacctggagatggagtggtttagcctttaaaagagggaaacacagcccatgccctcatacatgcacacatgcacaagtctcatactcaaaaatccatacagaatatggtgccaccaggatttagaaacatatgccacttcccaaagaacaaaagtggaacccatgtgatctcaagagtgatgatgtgaggtgctgagtttccttgctgccaggagggtgtgggtaattccatgggcactggcagcctggccaggaggaaccgcttagcagaggatgggtgctgtgtacagtagatggccctgcactgctcatcttcttctttggctccaaaattcatggtagaaagggctagagaaggtggaaaatgttagttgcagtcattgccaaggcaagacaatccctaattaggtgaaaaattatcctctgagcccactggagccactgtgacattcaggtcctaaatttgcccagggttgtgtcactctcaggcccttgccctgaactctgctctagctccccctttcccttcctaacttcaatatatggtaatcaatgcacttgagttctcctcctgccttcacttcacgtccatgaatgctcactttccctgcaggaacttacttgaactgtcactcagtggtccttgaatctgtaaccaaatacatgataacccgatatgtctttttttgtttttgtctttgcctcattcaccaaaaaacaacttgtaggcatatgtaagtgtcaagtgataacacgaatagatgaaaacatttgagtataagaaaaaacatttgagtataagtaaattaaaggcatagcaaagccatgctatgtatgttgttactccatcacatgcgcagtgagtttctgtatacttctgtaactgggctcagagcttcctaacaaagcagagaaggacacacagagcactatgttcccatgatgtgtaaacgaggctggtattcaggagaaatacaggtattcatagtagtgaggccagagatgctttcctcctgtgggttctcagaagggggtttgtcagggtggcccgtgttcccgccagtatctagcagtgaataccccagtaagcttttatgattacttcatccaagatctttcagtatacaatgatgcttagtgccaaagtacagttctataagttaactcaataattcagaatgcactgtcttctaaaggcctggcttgatacatggacgaaattgacaatatcaggaagaatggttggcctgcatctccatcagggaatactctgattgttttgttgctggtaactgattagcattgggaacagagagttctgggcttttcctggcaggaacaaggagttcagatgatctgtgctttcaattaatggaagcatatggttcttctctcttcagccaagtggcaggcagagccagtcttgttggttagacattcagaatccaaactagagctttgatgcctgactgcatagttaccttcctccatgctaacactgtagattagttcgaccccacaggcaaatgatggattaagaatgtcagtattcttccctataggccaccagagccaagggcagtgttatgtggagcttcacagtgtagtgtgggctttacacgggtgggaaatgctttccttgcacacatacgtacatatttacatatgtttctcaaacgcgtatggatgctgatgtgctcaataaaatccacatcttatttaaagacattagcaaatccatattagatcttgtcattataaaattctcagcaactaacagaatgattagtatgatagctatctttggagaggtcaaggggaggtggagtttataaatttttttttgacagtggaaagggtttctcatggtggaagaatttgggcacgttaccacagtgcgtacatacaggagtttcattttgtaatgttttcaagcaggtattatgaaacagccataaaaaataccaatagaaatccacagaatgcctaattttaagccacatctctttgcggtgaccctgctaagataaaattatttgtaggagaaaaatatacccttgggaaaaatataatttttggatataagccatgtaaatgttgtcaggcatctgctaataattatgatttttgcttttagcgaggtcaatcctgagttgttctttctaccagtgattaggcaggaggagaaattcccagtttgtaatgataaaattatactgtcagattaagagtgagcattcatcattctgttctcatagcaaggcacagattccttcacccagaaatggtttcgaatgctttatgaatagttttaaaagcaggggtagcatggtgggacacctagaactgggggcagcctcaacataagctggtgcagtgtgtggacatttgaactccttcagacataatagccatacctggatatttgtaggttgctcacagggagttgaggattctatttggttccatagggtagccctagaattagagggtgggagttgcaaagggatggcttttggctcaatccaagtatggcattttcatatcccaagctgtgtgaggatggggtaggctgccatggaggagactgagacaccgctcctgggatgtgtacatgtaagagtagacagccacatggctggtttgatgtcggggaaattgaacactggatgaggacagagatactattgagattgtttctgaccttgagtttaggcagttctgtgataaggcaggactgttgagaggtgataatttgttttatacaatgactccccatagaatttcctcaaacagcctgcctaattggtatgtctgaggtagattcagtttaccaaagttatgtctatgcagctttgcaagaatatctaataagtaaattaggtcaatcttttacaatcaaagcctcattcattgcaaatacaagggagtaagaaagaaaaatggcagaattactgggtgttcctagtaaagaaaagcaacctacccactcattgtagagcttcagtttcatgaatttagaactaacctattgctctgagtgaattctattgtctttggtaagaaaagcaggggaataaatgatgttggtgccctcttttgtctatccagagctgtagatgcggacatacgtttccaaatgcagtgtgacttctcactgtgaggctcatgtagagggatttttgtcctctagaaaaggaagtgcttttgcctgacattcaggtgcttggggaggcaagtagcgggtgaataaagaatggcataggaagtcattgtctttacagagtaaccaccgaggacctggaggggtaggttagatccctacaagttcctatgcgtgtccctaccagtgtgctgttgtccagcttcgaagtgtggagccgtatccacagatccatgccacagccccaaagggcatgctcttagggattcctgtcttctgacttagctcatgttgtttgaaaattgaagtgcatgccagattaattgtagttttgttagtgtatcaagtaacaacttcttacatttttagaacatcatgctatctcagacaccaaagaaaaggccctaccactctcagatgaagaggcattattatgtgtttggaaactatgtgcctagtgtttatatctggtcaacaatgagctggcctgccctggaagagaaagaggaagaactgtttctgtctgcagggatgttcaggctgaagtatgacagggcagggatcagtcaggaaagataatgcctgacattaagtaactcatgctgtaggaacttttgcatacaatattctaggaacttttgcatacaatattctcagtggctgctgtgtgatcatgactgccatccacgtttttctccgttgctctgtattgctctatatgtgtaccatttttcttagaaccatgctctcctctatgagtttgattcttcaaatgtaccaaatggaaaattatcctgctggtataaatttccagatagcatggggggagatgggagaattgtaattaagaaagtgaattaggctgggcacagtggctcatgcttgtaatcccagcactttgggaggccgaggcgggtggatcacctgaagtcaggagtttgagaccagcctggacaacatggtgaaaccccatctctattaaaaatacaaaaattagttggacatggtggcaggtgcctgtaatcccagctactcaggaggctgaggcaggagaattgcttgaacctgggaggtggaggttgcagtgagctgagcttgagattgcaccactgcactccagcctgggcaacagagcaagactctgtctcgaagaaaaataaaaaagcaaataatatgtcgaatacgatcctaattatgtcagagtatgtatctgacaaatgcttgtatttgcatataaaatacctgaatcagtaccaaattgtaatgtattatctctgaggaatgggctgagaggggtatgaggaatttactttttgctttataatttttttatgctgtctatctaaacattttactgtgagctctctcatgcaggcatctaaaagcccatctgtggcaccattttgctggtgcctacataaacaggtctcacccagtagttttctttagttcattcattactgaggggaacccatctatgagtttcatggattgaaggtgaccactcaggcagggaggctgctctgtcaaatcggagcatcagccttgtgttctataaggaagctcttggaaataatctgatgtggctttctcacttcacacagggggaaccaaggctagagagaagtcacttgccaaaaaccccccagctagttactggccgatcaggactagtctgcagtctcctggctcctagtcttgcagtgagtcccatcaagacaacaatgggaagacaagtatgattgctttcctgaaaacaaacaggcaacacaacaagaaaatagtttattgtgtgggtgaggttggttgggattcactttgaggaataggaggtgtgaaagatgaggaggggtgaggactttacgttttcagtggcttagtgatataattcattggtttgcagtgcgtggccctcagacagctgtgtggtctttacctgagaacttgttagaaatgcaaattctccatcctcacctcagaccctgctgcattagagactttgggtgtgggggccagcaatctatgttgaaacaagccctctggttgattctgatgcaagctcaagtttaagaaaatgctggtaaggtggaaagaagctgagactccgctttctggtgttgctatgccatcagctggtgtgtagggtatgtcccagacttctctgggtctgtagaataggagtgttgctacctaacttgctgaattggtggaagaatcagtgagctaatacaggcaagtgtgatttgtacagttttagcccaagtaatccagcttggaacatttgtttgctctgatcttcgtggactagtaaatatccctggtactccctcttatgatgtgcctttgaggctactttcatttacttcctttctccgtagcataatacagcctgttcctgaatactgaagccatccgtgtgtcctcttgaggctctcttggaaagattcagcttcccaagcctctgcacacaggggcaagcagctcgtgttggcaggcagtggggaggatgtagctgagggagcattcagggaggctgtgcagtggggcttcccccacttctatgaacggactcagacatgccattgactgttaaaaaaaatcctgatttcaatgttaaaatgtgagaagtaatattaaaaaactagtacgtgctgagcatttcatacatcattactttcaagcttcataactgctctgtggagttgaggctatctattattgtacctatcttacaggaaaggaaatggaggctcaattaagtcagtttatagggcaggaatcagcaaatttatttttgtgaaaggtcagataataaatatttttggcctttggggtccatatgtgctgcaacaacccaatttggccttgtagagggaagctgccattacagtatgcaaatgagtgggtgtggctgcattttaataaaattttatctgtggaaactgaaatttgaatttcataaaattttcatgtgttatgaaatattgttttaagtttttcacctactttaaaatgtaaaaagaagtcttaactcatgggttatataaaacaggtggcaggccagatttggctgtgggccatagattattgacccctgatttacagtcacctggaatcaagtttccaatccaagtgtgtctcctcaaccaggttttaatctctgctatactatgccgcacataataagaagagtagctgattgtcaactgtttatttcttaaaaaaaaaatctgtactaaaaatactacttgcctttatcttgaagattgtcaaatttttcaaggaatgtctaattgtaatttcctctggatgtgtttctttttagctcagtgttacttataatttgggaaggcattttggcttttgaactgacagcttggaattgtaaagtttttttaggtaaaataaacatgcacatagcataaaaattcaaatacttcaaaagtacataaaaggcaaagtaaaactctttctcttgttgctttttatctctaataattcttcccatagataactattcttaatagcctttttgcatccttctagaagttggctatgtaaatatatcagtatgtatgtatgcatattcatttttaactgcatacttgccttttcatgtaatacatcttagtgctccataaaaatttgtctattgatacataatttttatagcatagtattctgtgtcgtgtacttctgaaatactgttatttatttaaccatgattccattgttggatttatttctagtttttggttattaccaaaaatagttcattcaatatgctgtaattaaatctatcatgcatctataaataattctgtgagataagttcctagaagtgaaaccactacatcaaaggaaatgtgcatttttgataattaatgttttacttacattaactctcaagcaagttatttgcctgagccatgaatgtccacaaagaatagcattgctgatgggaaaattgactccttcctgcctcctttaacgcttccagttgtctgttgttttctgtttgctgagaaaatagattgtgtttcatcttcaaaatagtttgtagagaattaatacacggtgacactaaggttttgggctccagatctcatcatgatctttgacatctgtttaaaggaaaagtcaacttatctttgataacataagaaatgttttctgggcctccttggccaagattctcagatgggaaaggaacaatgctttgtgaaaaccataatctctgtaaatgttcctcaaagcctaagggagaattgttaatagcttatacattaattgatgtctactgattttgaccactggctatattccagcttctttactaagccctttatatgaatcatctctttgaatatgcatgatgaacatgtaagactgggactattctcactcatctctatctgtgcggatgcggaaactgaggttcagagaggcccagggtcagagaacgaggaaatggtagggctaggctttgaacacagagttgacttcaaaactgtttttgatcaccagtcatctcaaaattttgtaagtattaatttactgcatgatagagatcaatgaatggttctgagggagccacagaagtagctgttgcttctgccttctgcttcacagctagacatagaaacaggtgtttctgccagactgtgggtttcgaggacaggatggtgggtcacttacacctatatgacccaagtgcagaaaggtgctcaacaaatgttgactaactgaacagatcaatgaatgaatttgatacatacacataaaatagaagatatattaaggctttataatatcaggggctaagtagtagggtgtaaagattaagatgctatagatttttaagggaaaagagggcttagaaagtatattcttctctatatttcctcacttagtaatgagatcaaaagaatagttaattttatttttaatgttaaaagtttgttggtagctaatccttcacctctaagttatgtgtagggaaataggtaagaacagttaacccaaagccttttgcatctaaacttttatctaaaactgctatattttagataagtttgtttgtcgcagccaaagctcatgttgaaatttgatccccaatgtttcgatgttaggaggtggggcctaatgagaggtgtttgggtttttggggggcagatccctcgtgaatatcttggtgcttttacccaggtagtgagttcttgtgagactgattagttctcgtggaaatggattagttcctgcaacagcgggttgttatgaagccaggccaccccctcaggttttcctgtcttccccttagaccccctctgccatgtcatgatgcagcaggaaagccctcaccagactccagggccatgcccttgaactgagtctgtagaaccttgagctaaataaacttctttgctttataaattacccagtctcaggtattctttcatagcaacacaaaatggacgacaagataagcagttttttttaaagtgctctgcaaatctatttggtgataatcggttgtatagctggggtccagaagagatatatgttatgttttctgcactatggttgattatggatacataagcagaagacagattgcaaagaaatcacacaatttgcattaattccataatcataggatgatatgggtactcaccatagcaaggccataatttctgcatggctggtggcatctgaatcaagggggagtctaaacctggcatgtttgccactgacctgcaccagaactgagtgacctggaagagctcctccagctctcggtgcaagaactgagcttgctgcttgccaggccctgggccaggcacccattttcatctccagctcccctccacagtgccctcctctgccctttcctcactctggcacatgggccttttatccatgccttgttcatagcctctgcctgccatgttctgccttccctccgtggtttcttctttaccctggttgatgtctcttcatccttcagacagttttgcaggttgagtgaacttcaactttagatgtcctccaaactgcagggttgtggtacagaagtgtcctgaagacatgtgagggtatgtgctgtaatgctgatcctgggctccacccgcggagattagattcagcaggtctgggatggggcttcggatttaggtaatctaaagacctacctgaagaaccagtgtagcagaagctccaggcatgtgactcattgcagctgtcagaaactcactctgtgattttcagcttgttttggggttcttgcttctacccctcatgtgccacggccacatgttgggcaaggttgcttggacaattttaggctgaatgtgtgacagaatgagatctagagtagtgggtgggagtggtcattcatggcagattccaagggtgaagacccctcaggccacactgtccttacccctgtcagggccatcaaatttagagtctatcattacaaagcgaatagcaaaattggagatatgagaagcagtgaaatgtggagatggcagtggaagctctggaagccttgatggaaagttgaaatgaggatgtttaatttgggaaaagccaatgtaataagtgggagtgggagaaaatatgttatgtttgattccaggaggtagaactagtctcaatggatgtaggttatagggaggtcaactttatcttgatagaaggaaatgtcatatcctaatgacaatagtaatagatggcagacagtttactggtcactttatagatagtgtctctaagatttacagcatcatagtaaatggttactattaccccagctttacagatgatggaactgaatctcagaggtaattaaaaatgttgctaagggtacacagtgattaagtggatagtgagaattcaaatattggtcagattcactttaaaacctgaagtgtgtccattctgctgtttcctctcagtagatagagttgactataatgatgggctgcttgtagggggattgacatcccatcactaactgttcaagtaggacatagaggacaactaagaaatccagagagaaacctttcctaaagatggtccttgtcctgttaataggtgttatagttattataggcatgcatgttggtcagagaagctgggacaacattagtttaaacattaggtagatatctttcttgctggacttctcaaagccttttatatgttaatagacaggcagtatatacagtgattcccaaacttatttaatcatggatcccatgcttaaagaatatctcaagacagtttttttttttgttttttttttgttttgttttgttttgtttttttaacaaatgcagctgtgagaaaattcatgctgcagagaattcatgattgggccatctaaccgtacatcccttgagacttgaggttgtggatgtctctgtgattcaattccagaatgctctgtgcacctttgcaaagcggaagccctccatgcctgggcactttcatctggaccttgtgcttttctgactctgctaagtttttgatgcttttattgccctcaattttgctttcatttttaaggaggaatattgaatatttaatgaattccctcctctgctatgtccttaactattgattagaaccaacaattggcataataatcatttgaggtataattatttcttataaatgttatatgagtactaggaatggccttgtaaagttccagaaagtcatagaaagatacacttacatccatgtgtttctaaaaccaattatttttctcaaattacttttcagattggctattaagttgaaaagatgattgatttttttaatactggcatcaaggagaatcctagtgaaatatgatgtgtttactattaattatgttagctctcacctggaagcttaatgccaataatatttattttctccttttagtgggacacgtggtcatgttcactaataccttgttaattttgcggaggataggggtgggagggagagagtcattatcttttttattcaaatctgtagaggattattttgaattactcagagtttaaaatcaacctttaaaattttcaaccatttctatgagcaattttctcttattaggtagaggtaaactttgtcctggacattggtaagtaataaaattagtatttaaaaaccagcaaagatctttgaaagagtctgccctccccaccctgtagggggttggatctttggttcttatgttggagggcactaggccaaggtgacagaaactggcatggcagagagcatcgggtgggaaaaagggcacccaggtaccagcaggtgcccagcaccttgccttgtggagttatttgcagtcataaatatgtttggtagccccagttcctttttttctgggtgtgagcactttccattgagggtagaacaaaatcttgttggtcagtgtcaagtgggactctgtcgtctggtgggatactactaaattaaggcccacagatttcacattctcctgacttcaaattcaaaattgattactgtgttttatagttctgtcagaaattaatttttccactttggtattatggctttttggaagcatctagaattcagcttcaatatatacagtttctttttagttgcctcaaaaatggttttttcccccttcaaattctgttatgtgttttcttcctaaatatcttcattttgaaaatcgcatagtggaagcaacaggctcacagttaccttaaagacagtgggtttcccagagcagtctctccaagtcccagcataaatctgaattttctacacgttgaattttggaggtttgttttttgtggatccctgtgccactagcagactctttaagtccctgactttgtgtttttgagtacctctattgaatgtaatatagtctctttataggcaacatgttatttttatgtgcctttctttattacacatgatacaaaaccatctctgacattttttatactcactgaatttttattagagttatatctttcatcaataataacctaagctgcaacactcttctctggaatatttactgagactgccaccactgttgggaaagagggccattgccaccttattagaaatagtttcatcctcattgcttttatctggttaaataatcctttaatccctgttcattgcccatagatcctgactctccctgctagtgctgttaatgcaagtccgcggaacagtgtggtgggtgaggctggcctgctagtttatcagtttcgagtcgttatggaatcattagttctggtggctgcagtgattagaactggaggtctcatacctgcagctagccatgttcagtcataataagggatttagcagatatttatgcaagcagaaaattgaatcagcagcaccatcagtgtcttaaattatggcatttttcctgcagaattcctgtgaaatgtaatagtagatttggacagaatcatttcttacgttgattaatttagggtcttttggtaacacagagaggtaggaggttttttacatgaataagtcttccattatcttagaaactttaaatcagtttgttctggatggtacccatatgtgaatacagcagttcccatttaaatactcacctttttttctatcaatttcagaaaattatcttctcgatgatgtctttggtcttaggaaagtgagactgaaaacacataaaaatagaaaggctctgatactgaatttaaaatataaaatactagcctgcctttgaaacgtttgggtgagtttcattgtaattttaagagattaaaaaatagccgccgattatgggcatcttaaggcctcagcgtgcttttccccaggtattagctgttaagagaaaggaaacatggggctcaagaacgagccaaggaaaaatcagcggctcagttgtaggtgggacaaggcacttcccaggacacgtttggataacattttctaaaaaataatcccagaaaagatcacattccttttggttttttatttttttattgaatatagtttttaaataaggaataaattcagttggttcaggaatgaaaatagaaagaagtacagtaaaaagtctctttgtgctcaattttctcaccctgtcaccactgttattagtttctttgtattcttccagaggaattttaatacacacattagttagcatttgtatatatattctctttctccaagacatatgaacatgttatacacaatgttctccgccctgctttttgcaaataatatgtcttttttttgtgtttgtgcatagagataattgttaacttttttattcttctacaactgtatggtttttttgggggttgggggtacagggtttcaccctgtcacccaggctggaatgcagtggcgaaatcacagctcactacagcctcgacctcctgggctcaggtgattctcccacctcagcctcctgtgtagctgggactacaggcgtacatcaccatgtctagctaatttttgtatttttttggtagagacaagtgtattagtccattttcatactgctatgaagaaatgcctgagactaggtaatttataaagaaaaagaggtttaatggactcacagttccacatggctagtgaagcctcaccatcatggcagaaggcgaaggaggaagaaaggcaagtcttacatggtggcaggcaccagagtgtgtgctagggaactaccctttataaaaccatcagatctcatgagacttattcaccatcatgagaacagcacagcaaaaaccccaccctcatgattcaattacctccgaccgggtccctcccatgacctggggattatgggagctacaattcaagatgagatttgggtgaggatacagccaaaccatatcaatggggttttgccatatccaccagactggtcttgaactcaggagctcaagaggtctgcctgcctcggactcctgaagtgctgggattacaggtgggagccaccatgctggcctgtatggttttttagtgttaaatagaccataacttattcaacctatcctctgttaatgagtctttgaattgttcccagtattttactatcataagcagttctggaatgaataattttgtatgtatgtcatttcatatacctgtgccagttcttcaatatgctgaattcccagaagaggagctgctgggtcagaagatgtatgcattcttaattttgatggctattgggaaattgtccccattccataatggtcaatgtcttagtctctttgtgctattataacagaatacaacagactgggtaatatataatgaagagaaatttattggctcatggttctataggcagggaagttcaagatcagggggttagcatctagtgaggccttcttgctgtgccatcccatggctgaagggcaaaaggggtgacagagagcaagagataaaacttaaagactggaatccttttataattgacattcatcattcatgagggtggagctctcatgacataagcatcttccactgggctccacctcccaacactgttgcattggggattaaatttccaatacatgatttttaggggacacatccaaaccatagcagtcagtatttgggaataattgtttccaaccagccttggcagtaagtatgtctattcatgtcctttgcccatctttcagatgggtccttggtctttcatttgttaacttctggaagctctttatatagagagatattagccttttacctatagtttgaatcagtttcctgtggtggtgtttgtcttttgactttgcttatgtgtactactaagtaaaagtttcattgttatgtgtttgtatttattaacctcgaattttatggcttctggattttcaggcatgtcttaaaggccttttccactttgaggttaataagagatttttctagtttttctcccattattttttaaatttaactttgctcccaccacccctcaatttaataggattttcctatcaatctcattatccatttggaatttattttggtacgtgatgtaggatatagaaccaactttattctttagatgctatccagttgtccttgtgtcactagttgaatatacatttttttgtccactgatttgagatgccatcttcacttacactgaagtatttccatttgtatttggattagtttctggactttgtatttagatctatttgtttgtcttatagtcacattccagtaccagtcccacactattttaatcattgttcgataatgttatactgtctgatatgcttgtccttcctcatgacttttctctttcagagtctctctttttttttatagtcctatatttttctaaatgtatttaaggataaacttgtataatctccaacctaaaaacaaggttatcattaggagagcattacatttacaaatttccttaaggagagttgacagctctgtgagtttgtcttcctgtgtgatatagtttaaatagatatccccacccagatctcatgttgaattgtaatcctcagtgttggaggtggcatctggtgggaggtgtcgggatcactggggtgtagccctcatgaatggcttagcccatccccttgatgataagtgagctctcactctgagttctggcaagatctggtcatttaaaaatatgtggcatctcctcccaccttgctccgttcttgccatgtcatatgcctgcttccctttgctttctatcatgattggaagcttcctgaagcctccccagaagcagatgccactgtgcttctgagatagcctgtagaaccttgagagaatccaatctcttttcttataaattaccacagtctcagatatttctttatagcaatgcaagaatggtttaatacactgtccaagaacatggtatgtcttctgatttgttcaaattttcttttgtgtccttcagaagagttttaaagttttattcttatagctctggtgtatttcttatttagtcaattccttggtattttatttcatatgtactattttacatggaattttctcttcacataggtctactacttaatggaagtttgcatataaggaagctatggatatttgcaagtcaattttgtattttgctagctttctgagctgtgttgggtttattatagtttttttagcttattcttttagactttctaagtatataatcaacttgtttttaaaaagtcctagatttaagtgcttcttaccatttttatacctttttaggcttttcctagtttcccttattcaatgtaagttaacaatgatggtagtgaattcccttgtcttattttgatcttgatttttcttgtctgttaaagggaaaaactttttctctatagacataacacttttaatacaaaatgtctgaattttttttttccacaccaagcaatcctttgattctctgtggacattaactggtgtcctccaattcagttcaattctgacactatccacttggagttggtgtcagatcccacaaattaaaggactcaatcctacaagactgccccccacttcagatgccagtcacaaatcccatacctctgatgactggctatacattcaggagttcccacacctcccgtctcatgttcaatatgttgctataatgggtcacggtgccaggtaaatacttaaaacacaggtaaatactttgcttatttattactggtttgttataaatgatataaatgaaagtccggatgaagagatacatagggcaagggtctagaatgatcccaagtgcaggagtttccctgtggagttggggtgcatcaccttcctagcatgtggatgcattcaccacctcagaaccttgtcaaatcctattgtttagggtttttatagaggctttgttttgttggcatggttgaccaaattaatggtcattggtgattaggtcaatctctagcccctctcctctccctggaaattggggattagtgctgcaagttaaaatcttttaatcacatggttggctcctctggaaaccagcccccatccttcaggagtcatttcattagcataaactcatatggggttaaaaggatcttactgtgaataccaaaagatgcttctctcccatgtatcactcacattctaagggttttaggagctctgtgccacaaatcaggaatgaagaccaaatgtatatttcttactatatctcactatcaatcactttttagccttttggctaagatcaagtgtatatctcactatcacacatgtattttagtgttgcccccattaagtgtgatcttagctttgtaatagagaaaaatatattttatcgtgttaaggaagtatatatttgttcctattttattgagtatttttgttgttaccaagactgggtgaattttgctcagtacctcttcagtgtctttggaatgattacatgattttacgtgagctctattaatattcactggtttgatggatttactgattttgtgcaatatttgcctttcttgtgtaaactctatttggtcatgacatactattcttttattgtgcttctttatgtggtaattttttttgctttgctcttcataaatgagattcattttgagttgccttttatgtgtagcacttattttaaagaacttacatttagtttttctgtgaaagagtgttttctaaataatttcacattgtgagcaagattgtaaggagcatgtttagcataaaggaacaagtggtttcaaggactgcagtgtgtatgtgagtgcaaatttcagccagtactgaaaatagggtttgtctctttggggaggcatattatgcaaaataatttgttaacacttcattagtactaataagacctactgataacagtcattagttaactgaagtaattgtttagtgtaatataagtagcttgggtttacatatattagttcattttaattctctctacagccctgtgaggaattgatttcaacttatagaagagaaagcttattttgaagaggtgaaccagtcttgcccaagatcacacagctgtaaagggaggaatcacactttaaatctagatctccttcatcccggtgtccatattctcaaccaccatgatgtattgcttttaaaataagtttgagtttttgtaggtaatttgaggttaaaaaaacctatttcctgaagcagtgccttcaagtgtagcccccagaccagcagcatctgcaacccctggaaccttgttagagtcccacactccaaccatatctgctgcagcaggaactcagggaatgaggcccaacatctgtgttttaataagccctgcaggtgatcctcacatacactaaagctcaagaaccagtgccttagagactgcatcctcttcttcccttctgctgtctgaattgtaggagttattaacacgttgactctttgaataagggcaaaatattctttcttctttccagaaataaaggctaattatttgtttaacaccacatgtcttgtttacaaaatggagtatttgctcagcttagctccctgtgaaacttgtgagaattaaacattcttgtgagacgtcagtaaagcatcatttactcagagcctcagtccaggcagaggtcttaaacaaactggttaggcttcattttaggagtgaaagcagttcatagatgtgtacattttccatatatggcctgtctgtgggatgttccttcctgggactaagtagatggggggctctcaggggagggcccagcactcttagtcctctgcctctcagagaggcacacactgccactcttccattcactgaatgagtgaatgctgggaatgggagctcatggtgggctgcccgcttgacctcatctgcacacagtgccaccaaatggaggaaataatgataattcacttaacctgaaaggcaattaatgatttccatgcaattaccagttgcttgcccttccctttcggtgcagaattcattccattggcatcgctgatttacaaaaggcagactgctagcaagctaattgggtgaagtcattatagaggacagtgtggctgtgagctggagcagtgctaaagtggttttcgataacaggcctctcatccctgcgttggtcctcaccccagagtaattagatctgaatggtattggttgggggctgtgagggtgctatgggtttaccagtgaccaagtatagtttgctgaaatgagctcttcattatattcaggtatcttgtccagttcaggaagctcccaggcctgacatatttctgtgctcagtagatgttttcctgctgtgcatctatatgtgtgaccagtggggaattgataagggaaaggaaccagtttttagggtctgcagagtgtgtacttgtatgagctgattctaaaccattccctccccaatccaggtcagatatgaccatagccccagtctacatctctatacctcaggacctaagggctggagactaggtttggtagagctcaaagaaacctgggcaagcatgctcttatgtacatctatgcacagcctgcctctaacatttgtggggcctacagggagagtttaagcagaggttcacatacctcctgtctaaataactaaatcataaatcaggctaacccactgttaaacaataacatgtgttctgtcctccttccttggcagcttaaccctgataatgcttggggtgtggctgtgtgaaaagagctcccattcactgaccaccattggcttcatcctactccatgaagggcctggtgtgcatgccggcagacagccagcaaggtgctgattgtaaccccctcgtcactgcaaaccactgccccatggcctctcctgggcctagagggccctcactggcagcttaggccacctcaaaaggatagacctggaggacaggccagatagtcatggaaggtggctcagggccatttgggcagaaaattctgggatctcagggaccaaggacatgggctggaaaggcaaagcatgagctctggctggtcatttttttctaagccctacagaagccccaccgccctgggagggacgcagtcagatcaggcacagagtggaggctctccctgcctgtgtctgagcatgatgctggacttgcaaaatgttagcatagtttcatttatccggggcctccatcaaaggagaggctttaaacacagactttcatgttcatgtatacaccccccacagacattaacatgtacggatgatcagaagccgaaccacctatgtgagctgcctgcctcttgtactcacacattccatccttacacactaacagactcctatactcctagtggtcatatctgtactactcttatgtataaacacacactctttgtagttctcacttgtctgccacactgtggcattcatacccagacccctgttgcaaatcttcacacagagcagtgttttcacacagacacgtgcatctacctgctcacacatgtgtgtatacccaccaacatttcacttgtatacatacctccaaacgtaggcatctttctgcccatactcatttctctaacatgtagccacactttatctgggcatgtttttcttgtcagcacttgtgatcattggtattaccaggactcaggttgaaactagtggttgaaataaggcgttaaggttttgcgtgcagttattttacagaggttctacttatgactcatgagtgaataatgaataccggccacattgtttttcctgatgaccataaggtaatctgaacataaacacccttttaccttgtctctctaggtgacacactccctctgaaggtttacacttgccatccaacaggtcagaggacttggccatggctccctgacctggatattttaggacagtattcagcattccttacaacatcctacatcaaagaaaccatgcaggaaagacaaagtgacgctagatcttcctgggagcctcagctcccactttgccaatgattcagccccaaatgtctggtccccaggtcactgcctactagaaggagcagacacaaagcatgcacttggttttgtcacttccgtagcagtactgtctctgagatgaaataatatgtgctcagtgaggcacttccaggtcagcaatatttaggcaaaaaccctttaatgtcagtgttgtaagatgttcatctctctgatgagcaatttttattggaagaatgtttggtatttagtaatatacttgtcaaacctaagaaacacattagtacatcactaattaactaaactccagacttcgatcagttggtgaacatggtgtttttcaggctgcctctctgtaaagccatgatttcccctttccctactcttctttggaggcaagtcactaaccctagcccaccctcaaggggaggaggggaggaactaaggtctgtttcctgtagggaccagcgtctacatatattatttagaattgtattgaaagaaatatctcactcaccctaacttttaaaaagatacaatgggatatgatatgatttatggcctggacaagatcgtatagacttgtttctttctgctcttctctgttaaatatgataataaacgctggaaatagcacaagaggcaaccaaaagagaatgatgaaagtggtaagaaggtgagctggtttgggagtccagtgctggaaaggcgatgcagcagcagggcatctacatcctccccttgcccaacaggagaaggtggcccaggcatggtgtttcctgacccaccacccagcagaagaaagcagccccagcagggtaagaggctgaacccagccccagggtaagaggctaagggaaatactggcctccctgctggtcctgagaatcctgtcctctactgagagaggccacagtgtctgggggccatcagcagaacaggccccacaataagtggcctggtatgggaagcctctttatccctgtgagctcaaaactccttttccctacccagagacacctgggcagctggggacactggcagagggcactcaggatgtcttctcatcctcatggacctcagactgtcctttccagccaggtgacactagatggcctggtctgaggaaaccctttgccttgaagaacaaggcaagaatgtctgctctcaccactcttattcatcctagtactggaaattgtggtcactgcagtgaggcaagaaaaataaataaagggcactggaagaaataaagctgtgcctattggcagatcacatagttgtgtagtaaatcccaagaaattttttttaaaggaaatacagcctcctagaatcagtaagtgagatcggcaaagtcacaggatacaagatcaataaccaaaaaaaaaaaaaaaaaaaaaaaaagtgcatatcctcatactaacaatgaatatgtgaaaattgaagttaatatcatgtataattactccaaagaaaaagaaatatttagatatacacttaagacatgtatagcaggggtccccagtccccaggccatggactagtactggtccatggcctgttaggaacagggtcacacagcaggaggtgagcgacaggtgagcaagcagagctttatctgtatttacagtcactccccattgcttgcatcactgcctgagctccacctcctgtcagatcagcagcagcattagattctcataggcacatgaaccctgttgtgaactgcacatgttaggggtctaggttgtgctcttcttatgagaatctaatgcctgatgatctgtcactgtctctcatcatccccagatggaaccatttagattcaggaaaataagctcagggctcccactgattctatgttatggtgagttgtataattatttcatatgtatgtaataatagaaataaagtacacaataaatataatgtacttgaatcatcctgaaaccatccctgcctgcccctcccctggtccatggaaaaactgtcttctatgaaacaagtccctggtgccaaaaagggtgaggactgctgatatttaggatcggtattctgaatattgtcaaatggtgatgcaggtctagaaaggagtccaagtaggcaaatacaatgagcaggactgggattaaccacagtatgttccatgtagcctgaaacaaagatcttccctccatccatgatagtgcggaataacacatctatttcaactgacaaatacaaattgtattatatttacagtgtaaaaaacactgatgatagaaatcaaagaagacctgaatgaacagaaagacatatctcgttaatggatttggagacttaacatggtaaagatgttcattttctccaaattgctatacaggttcaatgaaattcctatcaaaattgcagcaaggttttttggtaaacatggataaggttattctgaaaatttatatggaaaggcacaggccctagaatagctaaagtgattttgacaaagaagaataaagtaggaggaatcactctacctgattttaaggcttactgtatagctacagtaatcaagacagtgtggtactggcagggggatagacacatggatccgtgaaacagaatagataacccagaaagagagccaggcaaatatactcaactgctttttgacaaaggtgcaattcaagggagaaaagacagcctttccaataagtgatgcgggagcagctggacattcataggcaaagaaacgaatctggaccgaagcctcatccatagacagaaattcactcaaaatgcatcatgaacttaaatgtaaaatttaaaactatacaacttttaggaaaaaaacattaaaaatcttcaggatttaggcctagacaaagaattcagacttgacaccaaaaacctgattcataagaggaaagtttggtaaactgggcttattaaaaaatttttaaaaaagggtgaaaaactctgttaagaagtgaaaagacaaactagactggaaaatatttgcaaatcacatatcttacaggtggcaagtgttgagaatatgtaaagaactcttaaaactcaagagtgaaaaaacaagccaatctgaaatgagtaaaagatatgaagagacattcaccaaggagaatatatacagatggcatgtaagaacatgaaatgatgttcaccatcatcagggaaatgcaagttaaagtgtaacagtgggatatcactagacacctaacagaatggctaaagtgaaaaatagtggcaacacccaatgctggcaaggttgtggagaaactgaataactcctgtgttcctggtgggaatgtaaagtgacatagtcactgtggaatgctagtaccatacagggcagcaattgcactcttgagcatttatcccagagaaatgaaaatgtatgttcatgtaagaacctgcacatgagtgtttattagcagctttatttacaatagctacaatctggaatcaggccagagggccttcagtgagtgagtggttaaaccagctgtagcatatccataccatggaatagtactttgcaataataaaggaatgcactgctgatacatgcaacatcctgggtgaatcttcaggaaattttgctgagtgaaaaaagtcagtccccaaaatgttagactgtataattatataatatttttgaaatgcccacattttagaaatggagaaaagattgatagttgccaggggttagggatagtaggggaacaagggggcagggtcagcaggaaggtgggtgggttataaaagggtgacaccagccgggtgcggtggctcacgcctataatcccagcactttgggaggctgaagtgggtctccatcacctgaggacaggagttcgagaccagcctggccaacatggtgaaaccctgcctctactaaaaatacaaaaattagctggttgtggtggcgcatgcctataatctcagctactcaggaggctgaggcaggaggatcacttgaacccgggaaggtggaggttacagtgagccaagatcatgccattatactccagcctgggggacaagagtgaaactccatctcaaaaaaaaaaaagggggtaacaccagggatccttgtggtgatggaactgttttgtatttgaccatggtagtggatacaggaaggtatacatgtgatggaattttgtggaactaggcatacatacacacacatacacaaatagtgcaaatacagttatacttagttttgtaagaagtcactttctggggaggttgggtaaaggaaaatggaatgttttgtaagaagtcactttctggggaggttgggtaaaggaaaatggaatgtctctggattatttcttacaactgcatatgaatccacaatgatctcaacaaaaaaattcaataaaaagatatgatgtgatgtgatcaggtttaatatattttgaaagtattcaaaatgatcaaacaggtcctattataatattttcagaaaaggatatagaaaaggactaaacaatgtgacatctgaaattcctatccccaaagttgatagataaataggaaataatttaatacatatcagtttaattctgatgctatatattttttaaaatgaagttttacttttcttcttacagaagtagtaaagactctttatgtttaaaatttccaaataaacacaaggaataaaataaacattacctatgagtgtttgctttttaatagacagcccaggctgtggtgttttgttttgctctcgctgtttccttctaacattcattttgcaggaagctgatggggcgatttttctttccaaggagaatccccaagtccttgggtgtgaatgtctttttctgactggctgggtctgtctttctgcagggatgctattggtttgagacaaggctcttgcacaaagtttaagaagttagctacccaagagactacaaccaagcatgcatcttacgtgcactcagtggctctgagtttatgttaggttgttgccaaaagatgtttgcatataaagaaagatggggcaagcttagtttccagagtatccaatcttgtctctgactggccccttttgttaagagtggagcatgggcgagtcttgcattgcctttccttcattggccaaaggctgccttcattgtcactactctacagcaggggtcccctacccatgggctgcacagcaggaggtgagcggcagggtgagtgagccttactgcctgagctctgcctcctgtcagatcagttgcggtattagattctcataggagtacgaaccctattgtgagctgtacatgtgagggacctaggttgtgcactccttatgagaatctaatgcctgatgatttgaggtggaacagtttcatcctgaaaccatctctgtgcacccccttcccccaaccccacctcctggtctgtggaaaaatttgcttccacgaactggtccctggtgccaaaaaggctggggactgctgctctacagcacagtgacaaggctgctcctagcttaatacatctctcgtctgagccccctgttatggacatctgttgtttggtctgaccagacattagccatccacctttctagcagatgggtctctcctcttgcctaatcttgtgattcaagtgagagtgtcatcttcccatagggtctgtctcctgatcaaaaggagtgactgggggcctgagagctaccagaggtgtctctaggacctggtactagactagcctctggtaccagtcatcctcgagaccagccccccttttagctgtttgtttttatgagctagggaggtgtattccttggctgagctagttcacattgagtttccttcacatgcattcacatgtcccaattcatacttttgccaagatcaatatacattattttctttttttctcccctttatcttactgttcttaactataaatggaaaggcaaaaataagttcatcattttattctgtctgtaagtttcctgctgtatcccagtcaagataggttgaagattcccattgtatgtctactggggatgatgcttttccaggagcagctgcagtctgaccacaaattcccctaatcagaatttaagaaggcctggactgggcagcccaggttgctcccagtgcctgtatttgcagtgcgtgagctcggctggttactggaagccacccagggtaagttctaacaaattcatgaatcaagaccaatgcgggattgcagaagtatatttagattgttcctaaattctgacattgctccgaggtaaatccattatctgggtaagagctactatgtagtaattaaactgaaaatattatatttgtacatgctttctgcccctcagcaaaacatatttaaaatattcttggaggtgatttttaaaattttgcacttttgtactgcaattccacctgagtaacattcaagcaatattttgagaagatgattaggttttttttgttttcttttgtttttatttttgttttgagacagattctctgtcacccaggctagtgtgcagtggcccaatctctgctcactgcaaccttggccttctgggttcaagtgattctcatgcctcagcctcgcaagtaactgggactacaggtgcacaccaccacacccagctaaattttttgtatttttagtagagatggagtttcaccatgttggccaggctggtctcgaattcctggcctcaagtgatccacccacctcagcctcccaaagtgctagcattacaggcatgagctgctgcatctggctgatgattagttttttaagtctcatattgggtgggtcctggaaagaagtcgttttgtgattcacttctgtgttcagtctgaagtctcacttggatggttaaggcttgccctgtggcctgggagccatctttacaaactgtgtacaatgacagcctccttggtcattcatgttggctgaagccatctctgcagttgtaccagccatgtatcatgtatgagtcctggggcttaagtcattcagggatgctcagatcaactggcattggtcagaaagccctgtattcctgtttgcagataaatgaagaggagaaaatgcaaagaaaagaaaacaggtttggtttactcattgttgcatatttgggctgattagctttattaaagaaagggtatttatactttttctgcattggatatggatgaggaaatgtccagatcacagagttttgtggttcctcttcatagatgtatctgcctcacatgaggccccaagaaataggacaagaaagattcagaggagggaagggtctaagaggtacaagcttatggcacaaatctgcattggtggtctgtatctggagttattggcactgttggctgttccctttgctcctacgataacttgccctcatctttgtttgcaaagccccagggtctgatctgaagctgtgacctttcttctaagagagttattgagtttgggttattccctgtttccttactctatagaccttgctgtgtaggaagctttgttcttttcaccagagtagaaggcttttaggctcctttgcaattctcaatgcctggtagtgagttgggcaagagatgccaaatgctcaaagactcttatctgtttcgagcataccagagccagaggattgtcaggatttcatgaccctctgatgatgatgtactttaaatcctaagtcagtgaccaattctgctcttgctttcaaatttcttttttgtaagcagcaaagtctacttttcttgcaaatgaactctcacctagaacgtagtacctcaaatggattaaggtacagtttctaagactggcctactccttgctttctacaatagatgttgaggcactttcttggaaccccaggatttcagggtccatgctttgaggagtattgccattaagcatccttctccactgccttgaagctaagggaaaagtactgtagttcacaaaagacagaaaggtcctggagtagggtcttctgattccctgcatgctttgaacttcatttcttgcagcttctctggaacccctgttttgtccccttgtcacaaatcccttgttagaaatcctcagtcaaaattcctcattttgcagatggataacagaggaaggctttgaaagagggagttgtcagagctagctatccatgcattcatttataaatatttcttgagcacctgttacatcacattttttattaggtactttattagatatggatcttggcctcacaaagcttataatctgaatacaaataattatcagcaacatgattactataacatgtgaggtataagatactacagggcacacggtagttatacttaaactggataaaggacaagtagaaattaaacatctagagaaagcaggggagggccatcttccacgcagagggaacaacctatgcaaaggcccagagatgggcaagtcctgagcctacgggtaggggttccctagggtgtagagagtgagaccagaggagactggaagctgtgaaaatgaaagtctggtcatatgggcctcatcagccatattgaggggtttggatctaaccctcaaggaggtaggggatggtttgaagtgggtaaagcacagtggaggatgaggtggcctctgtggggcttccatggcattaaaaacccagcctgtatgcatggcactttgcaatccagcatcacttactgagaataaatgtggatgcctttgcagcatgatgcttcacccctcggggcaaggagatcaagccacaacgtgggtgttaaacagattagtttggtcaatagtttaattctggcagcagctgaatgacattataaagaatgcagtggcatttctactggaaatgtctgccatcgttttcttcatgtcatgaggaaaataaaggcttcccaactccaggaatgaattagcatgaaagatgcccatcaatctccctgtgaagaatcactgtgctgcagaattgctttaacacagaggaggaagagatgataattgagcaggatggtgtgcagcccactgatagtcttgtgtcaaaaaccccatctcttttcaggatttaggttgggtctggatgtccctgttgagctgtggccttgggtcagcccaacagtccaagatccaggagcctggtgaggcgtgctccaagtgggaagaaggctgcccgcaccatttctggtgctctctggggggagacctagtgtccttgagggctagacttcttttggttctgagcttctcacaaaaggcttttgtttccacatattcctttctcagttcttgaagttggcttgtctttctcctttctttggcacagttgtcctcaaaatgtgatccctgtaccagcagtattagacatgcaaattttgcagctccaccttagacatgctgaatcagtacttctgatgatagagccagaaacctgtgttttcccaagccttccaggtgattctaaaggatgctcaagtggagaaccactgctacatcaagtgtgtatgtcgaggcatcgtgtggcatgccctagcatttgagagtgcggaaggtctaagtttgtgtttgagtatgggtgaacatgtttgatccatttagggaaggttctgtgcagggaaatagttgtaggtaacacctgagtaggggctgagtgaaacttgaaagttctttaatactcgttagtacctaatgaagatgtttatgacaatagctaacaattttgtgtgggtactgtgtgacagtcactttgccaagcattgtagacattatcctattttatttctacagtaacctctatgaggtagttgcatttactgtctccattttataataaaagtgaggctcagagcagttaactaactctctcaagatcatccaaccagaaaatggtagagatggaaactgagcccagttctgcacttggccactgaagtctaattcttgtcattctctgcttgtatactggcttttctggggatggccgatttcaggatcacctgggtttcctgtgtgcggctcttgggctggcttggtggacgtgtttcaatatacagccctgcaaagagattgaacatgaagggctttcatgcttttggggagaacggtacttaatcttctctccaagagtaactttagaagcataaacaggaaccaagaaaatgaagtgagctattttacacttgaaatgtaccacaagtgaatgactgcctattaaattgggccgggcctgtgcttccagccccctgtgattgaagccattaaaacatagacctggagtgtgggaggagcctggctaattgtcttcccaggtcattgcagcagcctgtgagaaggacaaggctcccatgctgcctgcgggtctccctggggagtttcttcttgttattaaacagttagaagtaacaattttatttaactgggaagatgaatctggcagaggcttagacaccttcatgaagccgtgtgtatgaggtttctgttttattaagctcaatagagtcagcttctgaacttcagcttgctactttcaggttgatcggtgatgctttttcaagtttctccctggttctgaaagctgcatgtaggtaggtactttgggaattaggtatgaactgccattttgattttacacccgtttcctttcccagctaacattctttaaggatttctgtttggctgttttctccttatggaccccaactttggagtctgtaccttgaaagcatgtcacttactccaaggaataaatgtaaattaagtcacaatgtatgtgtataccctgcctacatggcaagcagtcctctgtctgttcagcatctcaccattttccagatttatattggagacatccagtgatggactgcatttccctatgatttctctttcctaataagcttgtagccaagttccaataatatattaagctgagagcttttcttgttaatttccctgtagaaaagttgtggcaaagctacagggagactgaacttaacaaacagtgctgagctatgctgttcctctttccaaagaaccagcctctcccttggagagtaagtttgtttagcatctgttataatgttagagtgttgcaggaaattggaatctctctggcatcattagttaggggaaaaagacctcaggaataaacttcaagaaatgactcttaaccattctcttattatttagtaggtgcgtgcactaaggtgattccaactttttcagatttaactttttcataaactttattttgtacattatgaactgatgcccacaaatgacccttttgtccactagctttatatttttttttcagatgttcctgagtaggcagacattctgaactctggcagggcatgtcagctaacggttcatgtttttggcaagaccatcacctttgcttgtacaaccttacatgtttgagcaattttttgaacatttagaacatgtttttgctcattattttatcaacatgtgataaaatgagaataatttcatctcattgttgaaaatatgtgttgaaacctgggtctcacaaatgtggagataacattgggagtcattaagcaggccccaaatggtgaatcattagtctcagatggatggtccctggaattaagacagccaactacgtagtcaattgtgaggaaagaggaaaataaagggcacaaatgaagtgctgaaaatgtgtcatctaagatgatatttcaaaagctgagttattaggaatttcatgctgtttttaatacgtagagaacagacaatcccccatagctacacctgttgtttcattgtcatgctttttactttttttttttttcatgttatagcacattatgtacagggctgccttggattataggggctacccctttaatttgtcatcaaaagttcatttttctcatatcatgattgggagaaaagtgacaaattaattgatggaaatggtggtctgttcctgtctccatcctcagtctcttcctgcccagttgttatctcctttccctgctttatttttgccatagcatggatacttgtttatcatctgtatgtcactggtagactattagctccgtaagagtagggagttttgccattctagatcagcgtgtctcaacagtttttttcattatcacttccctaagaagacttaaatttttttttcctaattgcctctcccctttctgaaatttaaagccaccaatatactgtgtatctgtttagatgctatttgtctatctgtgctttatatgtaaaaagaagtgtaagattttgttttcatccctcaaaaaccagttttcactcccttgagggacagtgtggccccctttgagaaagcacattccagacctagtgtcaaaaggagtacatggagcacagtaggtgctcaattaatttgtgttgaatgaatttgacttacctaggatgtctgtcttcatgaaagtgattaaacccacacataaatgatgtgcttgctgttttcaagcacctgtttttagaatttcattgtctttttttctttttcagtagaggccaaacaaatgttggctaaccacttgacagatatgtgaagggggtctccctcttatagttgtattaaatctgtgctcttcttttaagagtctgattatccaggagaggtaatgctttaattgagggtcttatttaaacctatagataattatccctgatgatctatgtatacacagaaagcaaatgtacaaatttactaaatgctcttattagctactggtgttagcctttgttcccacttaagctctgatactgaaactgaactgtttggtgacagagcccctgagagtattttgcttggccttacccaaagagaggttccccccacctactctgaagtgggggcgggaatcaaatagaagcacttaaacagatcttcttagtgtactctggatttgcccaggcagcctgtgtgtttttagatcccttgatactctgcagctgctttgtcctctctcctgatggcgtatgtatgtgacatgataaaagccagagttttgagtaccttaaataaaacaagaaaactcgaggcttcatgctgtcctctgtgatgggaatagtaataaaagcatgacaattggtgtgttaaagaagccagataccaggaagaccttttcagatggagtctgatcaaggctttctcatcagacagaaacaaacccagtgcctgagccctgtggagggtgggcgctgcttccctgagatgctgtgggaggaataactggttgtgtacattcccagaaggagaagtattcattcatcattttcattattgccttgtttctccacagaaatatttcagatgctaattttcttggaagagaagattgacattcacacttacttttattttaacaattaaagaaaaataatgaatattcatgccaagaaaatgaacttagttacagtctaaacacatatcataatgaatggttctgatatttggaccctcatggctgtaataatacagttaagttcctaaaattggaatctattgtcatctcagtcattgactgaaactgaaaatatctcatcgaagatgttgtgtaaaggtctcggttattaggaatttcatgctgttttcgacacccggagatgaggcaaccaccctcataacatatagatctgttgaattttttatttgctttgttgggacagattccttgaaacaagacctctgtgtgtcatatatattgccttgtaataattttcattttaggggggttaggagtgctgtctcttcgagtgcttttttgcagctggatgcacatggcagtttctgaaatgggcctggacttttataacatgaagccatgtgcttttcttagtaactataactcattggtcatttaccttaggatggacagacatttaaaagatggaatttttggaaggtgccaaaatcagacatttaaaatggaaatttccaaggcaacaggctatttagaggaaacttgtgaatccttttaaaattggaatgcctcccccatttatgtttctacatagatatttgggtttttatattccagtttttctcaaagtgagacacacctatttaagcagatatatttctgctggccacgtttctgtggctgttggcttactgtgctggagtgttaaatgagtgattctaagaataattgcaaagatgctttgaaaacatggatataaagtcacacatcttaataaaagttgggggactttttcactagactttctttagaatgttaacattttctgctctggaaccatgtgtgtgcccgagaaaggctgaggattcagtatggagactagcaaccttcacttattcactcactcacctacctattcgctgacacagcctcttagtgaccatttgctcagtgcctgctgagcagtgattcctatctaaggtgctgacgaaacagatgactgtgactcagtccttgtccttagtgtcctcactgtttagagaaacccaacaattacactagagggcagtggagttcatagtggttaggagactagactcaggagtcagacctgggtgatgtgggccaaattattacatcctatgtgatgtggtttgttcctctataaagtggggtaaaatacaaacaacctcacagggctctttgaggattaagtaatctaaatccatgtaaagtacagttccttgcgtgtgataatacttagaaaatgatgatccattcatggcttcacagccaggtgctatagagagtgactcaaaatgcatcctggggggcactgccaggcagggcgactcaagtgaaaggattagttatgtacatgccccccaaaatgagagaaggttgttttctttttccacagatttaaccaaaatggtgcttttggaaatgaggagttgtcaatatgggatgtggaggacatgattttgaggtcatttgattttgttctgcactgctctgtctctgtgctccccatcttcctccctctgaaacatgggttcttgttgctctatctagaaacaccaccctcctgggtcaggagatgcaactgacccccactagatggagggcatggtgtctagataccctgggctattctttcagaatctacttctggggcagatggagtactggatgggttgcccagggcttagagactagatcaagagaatcctgaaggccatggctctagaaaggttcacattttctaattacttcttcaggacctgctcactctaaggaggcaaagcagctctaaaagacaccatggaggccctataaaatcatcatgtctctccaggaaaaatagccacctaggttatcttcagtgaagtagactaggggcccagccagggccaagacctcagcttcctaagcactcaacacagcctggacagacatatgttcagtgaatactttgatcatgatgagctctagaacattgggcaaaggcactatgccagttattgtttcttcacacatctgtgtgttttctggcaataaggtatactttctcatgaaatttgacctggagttttgtttggtggtattttgagcttctattcatttggagaaaaaaaggcatgattcttaattgctgtaattttaccttcatgaattcagaaatgcgagtcctggaataatgaatccccttttataaagaaacatatttgcagcaatgccaattcctggctcattaggcccattctagcagcggagatgtctggctttccccagggcaggacctgctaagtgttgggatactcttactttttccaatccctctgcctccactgaactccacctctcacaaggaagagttaacatttaatgaaaggatcttttgacacccactgccagaatcctgcttacttaccactctgcaaataattttaaatgagtgatttttgtcatcttagcatcattaattcaggttcacacaaagaacacagtgtatttgtgtaaaaggctactagacaaattaagagggtgatgctagcatttcctgtgtgcagatttggcagccgtcatctatttggagagattccaggtgagatcctagggaagagagctttgtataaaacaggtttcttctcatatgcctccttaaggttcccccttgcaggtcttacaacaaaggagtgccttggtggggaccctgcattttgtctgtcccacttcagcctgcttggagccagcctgggcactgcttttttccttgttgatgattttctttcatatcaccatgccgcctctgcccaggtacctggcagctagttacctttggtggtattgtctggtatggtggtctgatgagaaggagctcctccttgggcaggtttgggaccacctgtgcttgttgtacaccttaaatgtaggggaagaatctgactagctactataggactcaattctggcagcttgcttctgctgtgtctcaggaatgagaccagtggctcatttgtttgatgtagctgagtcatacaacttgtcaattttcccagcaaagcgtgaataaaatctagtctttccagaaggattaaataagtggcattgttgttcttttgcttaattcacaagttttctgggattccaacttcaaatatttgttaccttgaaaggaagttaatttctcagctttacaaattgttcatttcaatcagaacaaagcaggaatgctgttttacagttgtcattaattggataacttgcaatgtccaagaaccatgtgttagggctgtatttagagcagtctcctctggcacctgatgatgtggtcatctttggtataccttctattatttctctctggtcagttagaaaaggcactgtcctttgcatagggagatcttaccatcaacccattagaccgaaagtcaagagaccaagattctacttccaaccctgtcactaacaagctgtgcttccttaaacaaattacacccctctgatgggattccattatcccagagatgaagataaaggatcgagcttcatcttgaactctgattagtcagaaatggatttgtggtcacaagtcagtggggaagaattctgtaattgattagccatgtctgccttaggggaggaaagggtgagtgttggcaatcctgagctgggtcttgccaaatctccttctccttctccttctaaccatctatacctatgtagaaatatagatgcggtaaggttgggtaagtaagatagtgcagtataatggataggagtagggttggagccacacagcctgatttctattcccgcttgtcacttattaaccacgataccttggatacattacttagcttctcggagctgtaatttcctcatcagtaaaaggagagtgttgtagtccttaccacaaaagattgctatgactgagtcaggcgttttaagtactttgcatagtagatgatcagtaaaaatgttatcaagctgttcttactaatataagaagtacagtgagtacttacttcagtaacagtggctgactttgccaagcagttttttatttcaaaccacagtgtgataccgacatttggatgtagatgacaacctctaagcagcacagaggcgtgttacatcccatccctgaagaggaaatcccatctttagaatcagagcatttgagctggaagcaatcgcagagtccatgttttacagatgggaaacggaggctgtggtgggggaggctctagtccagtgtccctgggtggaggcaaggcaaagtggggcctgttctcagactccagcacattcttgaactctgtctctttccccttggcttagtgctgcccagcacaggggcctctgcaagaagaggagttaatgctggatgagatggtgctctctcagtgctcctacaaccacgggctctggggagtgatttagatagaagcaaagtgctgctttgtcactgggagcatgtttatttattcattatgtttgaaaagagactccagtacatgaatgaaattcttcagtcaactgagttttgttgtctttgttggtttatcttgattccttgtggcttctcatgggcctccctgtcttgttctctgttcccagtgtcaagtctgagctctccactcccttctcccaacctaggccttcagaaacttgcctcctaacccacctcctgcctctgggctcctctccttgtcctcaagcctcctaattcctgccttatgcctattttaaaaccttgccttttggccacttctttccattgtgatttcctacttatcctgaaagtcagccaaaagatcacctcttttatgcctttccgagtgatggtttcacaacacacccccgacccctgattcctccaggtagagttgggtggtgttttaatctcccttgctcttatttcatacttgcttattttactaacatattgcatgagccctttttttttagacgaagtcttcctctatcacccaggctgcagtgcagtggtgtgatcttggctcactgcagtctctgcctccctggtttgagtgattcccctacctcaggctcctgagtatctgggactccaggcatgcaccaccacacctggctaatttttgtattttcagtagagatggggttttacaacattggccaggctggtcttgaactcctgacctcaagtgatccacccgccttggcctccgaaagtgccgggattacaggcatgagccactgcacccggccttactgttatgatccttgaaagaaacattgctatattatacaatttgtatttgctatcactagcataatggctgccctgggtgagtattttataaatgtctggatgttgaactgaatgagccataacagctaatgtttcttgcatgctttctttgtgcccaaagctctgcagggccatatacaagcatctcatttgattatcttgagacccctcctcaagacagccttcacctgctgaatgtgtcacccattctgtctgagtccctcctgtcatttagggtctacctcagtgccccctttccctgccatgccatggattgcctgatcatccttactctcttcagaactcatgtcatagggagcattacatgatgagccatcctttcattggacatttggtatgccccctggatcatttgcttctgtaaaagaggggccaggctttgactttgaacctggattgaaccgcagttctgccacagtttgaccttgggccagccactgatctctttaaacactagtttctttgtctctagaataggtagttatgtgttcctaagaactttaactggcatagaatctgaggattaacctctgaaatgaaccgttatgcatcagatcaaaaatgtgcagttatcctgaggataccttgtggttcctgaatctacaaaaattgacaaactcagagcttcaccaaaactttctaccacaaactgctcatggtaggggaacatgaaccctattgctgggaggtttgggagtatggcctgaagcaatctttcataaaccttaaatttctttgaagtcttaggtttcatcttaaaaactcatacacatttggaattctacttcttaacatatctgtgtttattttggtataaaaaatgtgtaaaattatcatccagtaaaatttacattccaggaaggtactgtcatcacaactgttctaattctcattgaagacgagacattttggtgctgtggcttttcctcttgtccctcaaagcttagttgatgtaagtcttctctaggtgggagggaaaaatctgaccatagggaccctgcagagcacagttcttcctttcctggtctgaaggccagacctgtatacagggtgatttcaccaagtgggtgaggctgcctggaagacatttcacctcattgcctgggtgaaaaccaggttcttaacattaatttggaaggaatatacctgttttctatagaggtaaaaacatccttctcatatgtcttagatgtgaaaacctatagaaagtttggttcttggcacatagtaagtgttcagaaatattgttttctcccattgaaattacagaccctgccacctacccacccacactagccaatatttatccagtatcttttgtgggcaagactttatctttcatttattgagtcacagtgtgtgtgtgtatgcttaggacatggtatgcctttggtctgcacccaattaaggagtaaatattaacttttcccttgtaatggttacattgagcttttactttaaaaaattgggggtaggacttgtgaattaaaaaatatgcataggagtggaatatttctacagcaaactgatcatgatttgatatactataaattctgcctcatgtcatctctactcattcaggtactttctttaaaattcagctcaaatatagtttcctgaccacgtcaggccccactatctcttgctcattcccccttatctcttctcatttgtatcctgacactagcacttggtatgtgaggtattgtttctgtttatcttttcatgcctttgtcttattatttatcccaattggtttgaaggtatagaccacagctactgatacatgcttattcaatcagtcatctgacatcgttgttgttgagtgattgcaatgtgccacaagtctgcttggctgtagagaaatactggtgaagcagataaacatgatcctttctttctaaatgaatgatggagccacatgcttctgtaaggggggattcagccttgtagaagtgacatcactttctggtgtctggatgttttttattgtgccttggcattggtactctagggaggtgggctctgtatttgattcagacaaacttgggtttcaattctggctgcaccacttgccagctctgtgactttggccaacatatatctcccctccaagcttcagtttttttcctttgtaaaatagaaataaaaataatctcttttttataggttggggagataagttgagataatacaatgtctggttcatagcagtaagtaatagtaattttgttaactatttactgtcatttggaaatattttcactcttattatgtgttcgaccctgggctaggtataatgctaagtattaaggaatattataatgacaaaggccgttgcacttgagttttggttgcagttttctttggtctaagtttcctagtgttggtataaattaaatgcagacacgaacagatgcacattggttttgttgttgttgttggcagtacttctgttgacactgttcttgcttcaagagtacaatgaattaaaatgatgagaccagggcaagatttggttccagggccttgctgtatacaacagcaaccccagatgggaggaaggtcattatcatcacagtaataaccattctcccaggtgtgtgtgtgctgcacccttctattggagtctcactcaaactccaagaaggaggtattgttcccctattttacagatggggaactagaggctcatcaacatactgaattagtttggagcatgtggtcattgagtggtgaagacagtactagaaccaggtctcctgattcctaatctagtgctcttgcgagcgtggtggttagaggtagaccctggccttgtcacccacttgtgtaatgtgacttgagtttgtttcttcttctgtaaaatggggataacaatggcacttgcttgatagaggtttgatggcgtaaaatgagagaatataattgctctgcacagagcttggctcatcaagtctaaaaatatgagttcttgatagtgttgttgtcagtatagtcagtgtgcagaatctatgagacttcctgggtgtgaagtctgtttctgcacttacttgttatgtgacctcgggttagttgcttatcctctctaagcctcagattcctcctgagtaaatggggatagttgtaatgaacatgtgcactctgaaagcaagtgctcagtaaagggtagatatgactacagtggtgctggggtggatgatttcacttgatttctccactcttttccccctcatcaagaatgaaacccatgactatgccccagattatcaccttttatggtctccagctgctgcattgggctttctccttcctgaaaggatccacagtgatttgcagaggcctctgcagtgcattgaaaccaagactcatggccttgacctcccctagacctggctgagcacctgccccctggtcagcagcagcttgagtctgggaggtcagaggctaagcttggggttatgtttaccctactctccccagttttctatttcaatagactgtgcagcgtctttgtccagccaaccgcttgaggctgttatccacgtgcaagaagtgagcctctgacattgtctactgcaaggaagctcagcttcagggtaaagcaatctggcaacacacaaaatacaaatttaggaaattctggaaatgcattttgaaaggactaagtctccttgcctttggcccagggcctctaggtcagtcatggactaaaaaagtaaccatatgggcttctcacctgaccaagataagattgttaatcaggcactatgcaggcaaatcaggccaaagttgatgcacaattcctgctgtctgcttctgtccagaagaatccacagtgcctgacacatagtacatattcagcttatgtttgttgaattaataaaactaatctggaaagaattatggtttaaagggattctaagaaattgcaccatcattcacgtattagttgcaatatattgcaaacttattatttgccagacactgggtgaaacactttgattgtccctgatttttagtctgaagcattaaaaaaaaagccctgttttttctctctactctcaacacactcaacacactcaatacagaataactcacctttagtcaccacaatatgtgaggatttctccccaccaacacctgattctccagcagacactaactggatgtcctacagtttaacttaattctgtcactgtctacctggagttgccattggatcccacaggttaagggctcactctcacaagatggaccccccttcggatgccagtcataagccccaggctgtgatctgtgcttctgactgattggctataaattggggttcccataaccctcttctcagctttgattaatttgctaaacctgctcatggaactcagggaaccactttactctcatttacccatttattatacaggatattacaaagggtacagatgaacagccaggtaaggagatgcataggacaaggtgtgtggcagggggcggggcttccatgtcctcttggggtgcaccacccttttggattgtgttcaacaatccaaaagttctctgaaccctgcttttgtgggttttatggaagctccattacataggcgtgattgatcacatcattggccattggtgatcaactcaacctgcagcccttctctccagccgagaggttggggtgggactgaaagtcccaaccctctattcattccttggtctttctggtgaccagtccccatcttgaagctatcttggggcccccaactgccagtcaactcattagcgtacaaaagacactcatcactccagagattccaagggttttaggaactgcctgctagaagccagggtcaaagaccaaatagtagaacaaaacattctgtatctatagaatctttctatacccttatccataagagttttaggagctttgtctcagaaaccaggggccgagaccaaatatgtacttcttctttcacaatatcacagtaacatccctattgaggtaggtgccctgtattttgtagttgtaggacctaagcctcacaggtacttaaagacttgctcaaggtcacacagctagtgggtagctgtggtagaaatctgagatctatttgactctgaagatcctgctcttaactcctatgcaccaatgggatccaggatagtaggagctagactgtggaactgtgtttctttacctccctggacctctgtttcttcatcttcaaagaaatagcattagatgggggcttcggaggtttctcttagaactatcattctcagtcttctttctctttgggcatcaggtatacgaagggctgagttatgaccccagcttgtctctctgctgctggtgtgttggctgctgagaatgacaactgtgtttccatattgttttggctcattacagagaattatagctgattggcttttggacagagtactgggggaatgaacaaccttagaattgagcccctggactccagtgatgtcatgcggccaagtttactgacaattttgggtctagatatctctcttccctaactggcataaagccggactagggagaatacaaataacagaattagaagatgagagctgtgcagtggagcactgggcaaaccttcacctccatcccagctgcccctgtgtgccttgcctggtgactgggttatctagagaatgacagctctgggactcacaatgatgacttactggaaaaggctcaccttcacctctccagatgccccctagtcccagaccgtgtatctgacctgtattacaaatgtgccttttattatgtctctcctgaaccttcttgagttaataaaaaggattggtaggaggcttttaaataatggaatgaaatgactctgaaataaaaccgattattctaaagcatttcaaaaacaagtgcacatgtttttgtgtattcattcttagttctccaaagactaagatgtgatattgccttaagggttccctagataaataatgtatccagttctagcctggaaaatattaagaaagcaaggaagttctctgcttctttaggtggcattttcagtgtttctttgagatgaattcacgtaaaacttggcccagtttctttttcctgttctatagaagagggagggtgtgcaagaagaagggaagctgacagagcatggaatgaaattgaaactcatttagctgatattatacaactgacatctcctcatcactttgctcaattgtcctatgtataacagggtgaagtgtcaccctgaaattttatagaattggaaatgcaaggagaagaagggaccactctggatcttacatttggtcccaagatcttgcagttctggctttgtaacaaaaaatcaatatcaaatctagttgtgttggcaaatacacaagtttgaaaagactatggtggaacattgagagcactgaaagtacttgagtcttaatgcccaagagcataaatatggatttattacctttggtgtttgagaaagtttatttttctctgcacttcctgtggttttatatttgtataccaagcatattgtgtgcctcttttaaaacttgatcgcagtaaccacatgctaattgactgtatgaatcaattttctaccttctaatataatgtaactttcctggccattgttaggcgaaagggttgggttcttgttttgtcctgatttgactgacgctgagaccgaattctcaggagggccataatggaggcagagtactgtctagtaatatgtggttagtctgatttagtcaaacccagtgacttctcatctgtcacagaagccactctcgaggttcttggctcaacaaattattatgaaaatggtttcacatttactgccaatggtaatgctgcctgcttccaactttgggaaggatatttacggtgtttctattagtttgagtcatatcagagcaaaatcaaactacctccacatctacttgcgcttacaagcaattcatttatagcatgcaggtcatgcgatgctggctctgacatggcctggttatttagggttttggcagccttaatagcttcgaattacccaacagaaaatatattttggagataggagatagtaaaaacagtctttgtgggtaattcctaccatggtgtgggatttgatattgaaagggagaaagattgttgctgccacattcaagaggctacatacagaaattttttaaaaagatgtctcattaggttgaagggtggaaataacatttgttgagtgtgttctttgaattcttacaacactcctataaaacaagcacttaattatcccagttctacaaatgaggaaatggaggtcaaaaggggctaggagacttgctgattggtgattgtttcatcaagaaggaatgaaactgggttttacagtcagacagagctaactccacattctgtgttccttcctttactccataaaactagaattctgcttagttttatttttttaaaataatttcaacttttattttagattcagggggtacatgtgcaggtttgttacctgggtatactgtgtgatgctgaggtttggggtacacctgatcccatcacccaggtactgagtatagtatccaatagttcatttatgggtccttgccccatttcctccctcccacctgtagctgtctccactgtctattgttgccatctttgcatccatgagtacccactgtttagcccccacttataagtgagaacatgcagtatttggttttctcttcctgcattaatttgcttaggatagtggcctccagctgcatccatgttgctgcaaaatatgtgatttcattctttttaagagctgcatagtatttcatggtgtatatgtaccacattttctttatccaatccactgaatttcagatatgaaatggtgttttggatggcgtggtctctttagggaagcagaattcagtctttctcccatctatgagttgtgtggcctttcttaacacctctcaggcttcatctcctcatctctaaaaacaaggacaacatcctccagttcacacagtcatccatattataataattctggggcaaaagttattgatatgagcatatccacagagctccctgctctgccatccaacaaagagaatcctgtaattgccagcctttttttgtttttctctccttctactcgtaaatagaaaaaaataatgtttttctggttgggagagaggttaagccagtcaaaataattgggggcaaagagaaaaagacatttaaattgggattattttgggagtgctcatagtgaggctggctcttttgtgggtgtgagggagatgaatgggagagggagggattttgattaatgttgctggggattgtatgtttagaaccttttaaaatgccttccagggagagtaaaggatgaaatttctgattttttaagttgataaatgaatgagctgtgctctgattgtaaaccgtgtaggattgtggactcatagggtatgatactaattaaaaataataaccaatggcaatagtaaatcacaggaaccacaagtagcatttgtggagcatgagcagagcaggctcggggctgagactttacatgcatcctcttatttaaccctccagcaccccagaagcatctagcacagggcccagcacatcacatgtgctcggtaaatattggttcctgacccctgtcttttgtccctgagtcatattgccacctcctccactgtctctgttcctgctacagggctctattaagtccacccacagtggtgtctccatttaccatctcacactggcagaggaggcaacccaggggacctattgttacctgcaggtaaagcatatggaaacccagggcagtgttgcaactgaagcctatacctcttcctgcagttagaaaaagtttgattgaaaaaattcatggaggaaatatatgtgcacctgtaaatcatttattcaccatcccttctactacataatactaaatcaagagaatgcaggtgcttgtgtgttggttccaacttagaacagccccccactgaaaaggctccctgctggtgggcctgttccaggcctgcaggtgctcattctgggcagctggggttgtcagtgaccttggcagagtgatagcagtgccggctggtgacaggcgtggaaggaactcatcagacaggctgctcggggttctgtacctggataccagaggacctgggcaagaggacattctggagacctgagactggagctgggaaaatctgttactcagggccaaggactgcacttttatatataggtatatttatgtacacattccaggggcaagcatgccttactctcatattcttcacaggctggtgcctctgtggttcagcatgtggcctctggaatcacctggctgatttcaaatctggggtctgccacttcatcatcatcgtgtccctttgacaagtctttaaatctctctggttctcagtttccttgactgtaaaatggacttgatacttgtcctgtctttatggagcatttgaggattaaatcaaacagcccaaatacatcgcataagatgttgcctggaacatagataatgcttaataaatgtcagctatgatgatatttatgtgaagtttctcctgtttgaattaaatatgctggttgtaacatattaaaagcaactttaatttgtagaattacaattagcatttcctaaatacatctactgatacctcacaggagccctaaggagcagttggttgatataagtgaagaaacagacacacggtggggcaagtctcttgcttcttgtgcctctgctagtaaattgcagggtgaaaaattccactgagtcatggccctggcttctcccattcagtcatgtacgcttctaaaataatttcaccttgttggctttttcatatgctaaggactcttgtttctctttccgtgtttggcaggctcctataacttgaaagctgggtagagataggcaggtgaacccagcgtgggtggcctaggaggccggcatggccttgggggcatgaagctccagaggcttggagggaattctcaggccactctgtggctttgtgtttgcactctcagaagcccttttctttaacctaaacttaagtatgcttccacttaggggttattattggcttcttggaatccagcccagtgtggcagccttaacaaggatgttaagtaggtttttgagcacagctaatggttcttgtagaggaattgtaaagaatgatacatattgaatcttgcttttgagtcgttgtgctgcaggatagtgtgagggttaccagtgtgttttctgatctgcctgcctggcttctcaccctggctttgccattgtagatatttgaccttgggcattatatgttgacctctctttgtgtctaaatgttctcatccgttcagtggtggcaatgatagggtctttctcatagggctttggtgaggactagatgaattaatttatacagagtgcttggaactgtgccgagtacatgtaagtgctatgcaaaactcagttagatgttccttttttctttaattccactgtttctctccccagtgaccagctcaggctattatggcacagagatgctcttcagtctgtttgtaacaagtaagaaatgttgtttgaccttcagtggtggctgtgacttgatcatgcatcttctctaaaactgagtccaagaggcatgtttcaggatccgaggtcacagggacatctgcaatcacagcagcagctgggagagccactgcatcccaagtgcatagttccactgtctcctttcctgccacccgactcagacaattcatcactgccaagagcagagcctttttcatctcatggagtcatagggtgaaagccacctaccaggttgtgtagtccaattattcatttcctgtaaactgttgacttgtccctgcttgaacattctcaggcctaggaaactcactacccacagggcacacagctctttagagagcacgacagcttcctttcactgacgtgcaataggctgcctcatatttcccattcatggcttttcttttcattctgaaaccatgtagagaaacatccacatctcactttactccttgacagcgcttgaataattcattcttaccaagtaccatgccaaattctgtgctacacagtgacaacatggcagtgaatgaacttgctcttgtgaagcctatagtctagtggggagatcaactggtaaacaagcaaaaggagcatcaacttcagcaaacttgtaaagaaacaaatggcgtacggtgatagggaataaatcatcttctttggagtcattgggattatcacttcttaggagaaaatcttttagctggatcttgacaaagagggagccagccaagcaaagggtggtggagttggcctttcatgcagacgaaacaacttgcacatggccttgaggtgggaacaagctaagcatgctcgagaagcagaggcgagtgcttctagggtatatacagtgaggggaaaagagcgggatatgagattgcaggggtcagtggaggtcaattcggatatggaccttattccaaaggcaggatgaagctgctcaagggtttgaagcagacaagtctggctgttggatggagactgcatttggtggggttggaagtgggaaggtcagttacaagctgcttgtaatattgcagcttgccctaggggtaagtgctagaagtgcaagagaggagggggagtcttgggagtatgttttagaggtagaatctatggtacagggtgatgggctgaacaaagggaatgagagaaatgaggtgaatttaaggttggctcttagatttctacctttactattaggtgggggagggtgccatttattgaagggtcctagaaaccaactgatatgtttccctctttccaatctgctgcctcagttttccatcagagctgagtcatttctgctgagacagtgcgctctcccagacacagagtggggatgcatgaagcattttaggttttgttccatcaggtttacaaaactgtcttctatttttaagctgttttgctactggcttaatatcactacaaatattctgaacaaaataaaaaaataatattagcatctaacatttattaagccagggctaaagactttgtaggcatgatattgattgatgcctcataacagaccaagagttaggagtagttatttccacgttacagaggagtaaaacaaggctagagctggttggataaccagcccaaggccaccaagcaaatgcagagtacaggacaaatccagatctgtcagaatccagagccccagcgcatatccactatccagagttactctgtgtgttgccaacattccacgtttagggagaattcaacttttcccctccctttggaagtggtggcacatctacattgctaatccacattacttaagagggattttccataatgtcctccaatcagcttgattaattgatgaagtagagacagttatgcaagagtgacattgctcctgatctaagtagtttcttgtttacatgtgcaacgttagaaagcaccctataaatcaaaaagttgtaagccggataaagcaaataacttctgttgatgacttggtgagatactttaaattcatttacgtggccccgtatgccaagttctcgaggattatagagagaagatgattttctcatttagctaaagcacacattacccttcaggtaaacatggtaatgtcatcctaagaaaaaaagtgtaaatagcagtaatgataaggaaatcatatagtgaacattggtaattagaagcagctccctgggacttccccagggagttaatgataagctgcttaggcctggagccattcatcgcctttttcacttcatgagatgagtgacatgtctttaaccttgccaccctaatttggggaaatgttctcatcacacctgggtggtgatgctgaagctctcgtgaaccttatcagtgaagatctcatatcaggtgccactttttccctcgatgatgaggctgagctcatcacctgggcgctgggacacactagatcatctgttgactgccaatggccaagcacagaaaagtatttgaaatctattactcatgtccatggtgtcagttaccacatttagagcattaaaagacaggctgtcatcagttagttacttggtaaaccaaggtaatcattagcctaaatgaagtttcattaagggtaatgtactcattaagcacaaaatggcttgaaaaagctgaactatcatcatttgttagaataacccaaaccttggctaagaaggttgactttcacctttgtgcaacaagcaatcaacatttaattagtcgagtgctttgatttgttgattagaatgcaacaaggacgtgaatatgtatgatgttcttaaagtaacatattcagatcagccacagattttctgaagctacttgtccagcgagtttaaaaggcttacaatgaatatggatgctagtgattatttatagaagaactcttctattcccatccttagcctttacaaagttatttttgagtttactgtgacctgatttttaattccaggaaaagaatgctttgctgttattttccttttcaaatcagagttcctcaagtgaaggagctgtttcagcctgtgaacacctaactaattcatttacaaactgaggaaatgacttttgaactgaaagcctctaagggctgttcaacacaatttttactcattggttctcctggaggcatttatacatgctgggaacaccaaaaattgatatcatgtacatttgtgtatgtacattcctgcatacaactatatcaggatggataaaaccaggtctcaaatggagtggaataccagcttgtcctgggcattagtctggcttttctggtttgtcatgttgcatgaaaccttctgggtttctatttccaacacaagaaaaacattcaaaaaattgtgtattagcagtatattcacaagcaagtgttttgtccagattttgaacaagtagacaaaccataccttcccccatgacttctttctttcagtttttccttttcatcattctattcatagcctttcctgtgttgggattggaagtggtgaggatttgctacagctacatgagtctgggatgtccctagaggccgagtcataagaatgggatcagtatgattgggaaatgattgcatccaatgatgcaaagcccatgctctgctcagatggttggccacgtattgttccttagcaggcttgagcacccctgtaggttggaatgttcaggcacaggctgcaaagctagtgggctgggagacttggtaccagtgccacatctgggcctcggttggactgagagttgtgtggcttgctggggtgcagtttcaatgtgcatttaagtctcatgggttttgttttctcattttattttcccctgcatggaatagagctgggtgtatttttagtataggcccctcagagttgatagagtattggtatgaaaatgatgaagaagagacagtgtgtaccgtttactgtagccattatccaagttgggattaagcagtctttctcagtgtggtgcagcattatctttgctttttctttccatttttctagaggaaagcttatattgctgtaattgttcaaatgaagtatgcacatgaggtattttcaaatgttaacgttggcattggtaccagggcttggattacatcccaaacggggcatctctgggacttagttaataaggttctgtttatattagcattgagaatattaaaattcttccccaaacagctggaaatgttacggtggctttgtttctgaagcataacaggaatgaagcacattattaatttggaaacaggtaggtagagcagtccttctcccccactagaattaagtgatgagaatgggtatttgtgaaattgactgaatggtctttgggggatgcttattaaaatcctaacatcgttccagagttttgtagtggattcattatcagctgtaatcttattaggactgttttgttttgtaatcaacattccatccatggagcccctagatgggcagcatgcttctctgctggtccagtccttctggtctcttttgttctgatgaattaattcctctccttttctgtcaatcagatccttcactcaatgtgagacattgtcttgctgatgcctttcccttcctgggacaactcaacaggacagttgccttgatgtctgtattgtttcctttttgttgttattttctttccccaagaaaaccacattctaaagatgccagtggacaaatccccggctgtgttgtaaaacagagtggggcttgctaagtacatcagggtctattcacagtgtcactggcccaacttttcaattcatactcacagtgtcattaacagaagacttattctagaatcggctctgggttccaattccaacctcaggaggtttttaaactactcaaagcctcagtttccttgtttatagaagagggattccaacaaatacctaatgcatgaggggcttaaaactagatggtgggttaataggtgcagcaaaccaccatggcacatgtatacctatgtaacctgcacattcagcacatgtatcacagaacttaaaataaaaaatggaaataaaaaaattaaaattgaaaaaaagagggattcaaatttgtaaattcatccatttactcccattcactgaatgaatagtaagtacctacctattatgtgccaaacactgttctagcaacagtaaaccgacaggaatgcctgcctttctggagcatagatgctggtgagggagacagccagcaatcaggctaaatcagtaaaacacagagtctggtagtgtaagtgtcaaggagaaaaagtaaggcagggaagtgggggtataaagtgaggagttgacattttattttttattcattttaggaggtttgatatttcagatggggccagggaaaggcctcactgagaagctgccaatgagcaaagactagaatgaagtgaggaggcagggacattggggagagggaagcagcaggttcggaggcccaaaagggtgcatctggcctgtctgaggaatcacagggacatctggtggagggtggagggggtggaaaatatttgacaatgaaaacagagaagccatggggccatgactaatacagaaggactcttcactttgagtgatatcatgggatcacagactaaatggaagaagcagggagaccacttagaggctgctgctctagcgcaggctcagggcactaggggcttgggccagagtggtgatgccagaggcgagaagatgctgctgagttctggctatgttttggtgagtttgctgctggagtctagagggggctggcagcaggaagtgctgattttcagggaaggatgggtgttcatatcaggatgcgttagaggcttctgtgttgatggttgagtctagtggtctgaatgtcaggggagggacccaggttgggcatgtaaaagctttgggagtcatcagcttgtagttggtatttagcaccatgagatgcatcacctaggcagagaagcaggggcctaatgactaaaaactgggttctctgacattctgaagttggaaaaatgagaagacagtagaagaagaggctgagaggaaattgctcgaaagggggaggaaactcatgagaatgtggtgtcctagaagcaaaataaatgttcaaggaggaggaggagatcattggggtttaatgcagctgatgggtcaggtaaagcaaggactcagagctcatgaggtttcagtagcggccacagagaggtgagcaccatcctcgtcaactttgtgctcaaaactaggtctgttgtgactcatgcaacccaggaggctcttttctaaccagcccgaacttaagagaaactacgcagagaacaaaaaccacagctgagatgggaatccatgaggtgaaggagggtcattgctggcctgagtggtattgatgatattggaggcatgtgtcagactgatgccatgttcttctgaacacagggttcattgtgtcaacgtgtgggctggttctaagacaggtggctgtcatcgcaataaggtggcagcaccctgtgttctcctgggtcacaatgtgacagaatccactgactcagactctgaggaagatgaatttttcctccttaaaagctcagtaaacagtgaaaaagttaatggacagaacagtgaactagaatccacaagtcataaataaatcctgatagtcattggtaggtctttgacaaacggttatggcagcatcacataaaggattgttctcttgatggtgctgggagattttgcagatactttaaggtagattttgcaaatgctttaacgtagcattccatgctacccaccaaaatacatttattcagtcgtttagtatttattcagaagagttatgtataaaaatttagaacacgtaatagaagacatggttgagttttcatctaaccataaagacaataatcttaaaacaagtttggatacactaaaattaaaacctgtcaaaaatcaaacaacacgccaatcaaattaagaaaaacgttgccacaaataagtcaaggagatgctagccatactatataaaaagcatttacaaattaataaaagtattaaagtcttactagtaaatagacagagatgagcaaaaaatttcgtagactgtagataaacaattagcatgaaaaagtttaacttcattagcattcaaagaagtgaaaaatgcaacaagaaacaatctttctgttattagccagtattttttgaaaagatagtgcttactttcctttctccctttgatagctgtttatccagcccgtcaatatggcaagcactatgctagaaagcatggaggtataaattctggaaagcagttagccatatattgagaattttaaaaaatacatatgttttgttaaacagtaatttatcctttcagagtctcttctaaggaaatgaaattaggacaaggacatatgcagaaatgcattcattgcagcattatttataaaaccaacatttaatgaaacatttgttggtgaactgttatgatggattaattttgatacttttatagaatagaatatgtgaaacttttttacatttgtttttaaacaacaattatgacataaaaaagtgaaaaggtcagaatatgacaaagtttatatcacatgaccccaatttcataacagaaaaatactgatgtcaatataacgaaaaaaacactctattatgtctataggggggtggtattacaaattatttgcctttcttatttttgtacaattctgactttaagaagttttaccagtagcagtgaggaggatgattgtaatatttacttagtcctcacagtgtgtcaggcactgtatcaggtactttatatagattgtcttgtttaatttctacaactaggatataaattgggaaatactatcatagccatttagtaaatgtagagactgaactctggtaggtaagtaacttgcccatggtcaaacagctgttaggaagtggaactagatttgaacccatttaatggcttcttatctcctattccacattacgtctcaattaaaatgtattactgtgatgaatcagaaaaaaagaaacttaaaaaaatttttaaaggaatacaatgtgttaccaaattttattcttagtatgaagatttttctcttctaatggaaactagaatttgaatttcctgtggcaggcatgtcacacacattatcttatttaatcctcatgcagccttggcaggtagatattgtgattcttaacctgaccttgttgtgcatgggaaaactggcccagagtggcacagtgacttgtccacggtcacatagccagtgcactgcagagctggaattcatagttctgcttcctttcaaagcagaattcatagttctgctccctcatccctcatctcccagagtatctcgatcttcctcagccacatctttttaatggtgcaaaacaagcaggtgccagcagcttactcaggacagtcatttgttctgatgtgagagggccctgaagctcctggacatatgagttccagagcaggttttggttgtatgaatgcagagattcatgtctaaatgaattctggagtcttcgcagaatcagtgagcctccacagtcatccaaagagtgtaagatcctgatcgtgttgtcaagattaaggtgatggtcctcaggtgggtatcctggcacataggggactttggtcaacctctttgcctggatttcttcaacagctccggggtgactaggttattttctttgctgaatgtcaatttaattgaagctagatatggatcctctcatgaaactagaccagctattgcaagccctttgatgccaggattttctgattcaacaaatatttactaagctcatattgtgcagggggcaccctgaagagtactggtcacatgatgataaagacaagcacaattcttgccctccaggagcttatagttcagtgggaaacattaaccaaatgatcacataaataaatgtaaattttaaacagtgatatgtgtcaagtagaggcacacagtgctccagaagtttataaaagcaagatctgatatagttggaggcagtcagggaatgcttccttgaggaagtggcattcgagctgagacttgaaggagctaaataggttaaagcagagaaggaatagcattgcagccagtggcatcacatgtttaaatactctgtgatggaaggcagtggatgggagggggtcaaagaagaccacttgcagagagtaaggaaagcctggtgagatgccacagagggaccagctgaagccagatggcccagggccatgcaccttgtggagtactgtcctcatcctagcagcaatgggaacccaccgaaaggttttcaggcagatgcagagggctaggcgacagatttatgttatgaaaagtgctctctggctgccatgtggggaatggtttgggcagggagagctggggtttggagtctgcagttgggagactgttgctgtacattagtcttaggttgcactagaaaggagctggtgctggagatggtggcacgtagatggactcagaataggtgaggggtgtcagagggcctgaggcaatgatctatgaggtaatgggtagcaaaagtgggtcttctatttcttgagatccttcacagcatttcgcattgccctgggcacatggtagatgctaatttgattgactggtgctcttgggtggcctgagagagttattctcttctctttcagtcttccacatgcccaggatgaggtatcttagtgactctgggggccatactttgtgacagtagctctaagagacttgtggggtgcacacaattctgcatatttactactacccagagggctggcatctgcatccctggcttggcccagcctattccagccatcctggagggatgtttccctggtgctgccaaccagtcatgtactcatacctatctttgcatttcctgctgcaggagcctgcctgggctgagtcacctgccttggagtaggtagtctgggtgatgactgacataaagtttccaaatctggagctgtgggccaccctcacatcatgccatgcacattggcagcagtccaagctcaaggctggcctactgtagcctgtggccaaatagggtggccgtcatgcctaagccccatccttcatccactgccccagctcccacatcttcctctgcttagtgaggcagtaatgatgtcagcgctggaactcagaactcattttatggctgcctgcatgctttgttaagatatcttcaaaaaacaattaatgttaagcaaaaccacagccctaaaattatcttcgtaaatgtctatgagattctggtgaactgcccactgcccatcaaggcaaagtggcaggtgagtatctgtgagagaggccttcctggaagccaaaccactaaataggcagaggctcctaaaagttggaaagagaaacaaagtggaagcgagtagagggagttggaaacctgtctacatatgttggctatgctttcaatgaaggggcattaaaaggacaggccaaacgagcttatttagtttggtttaagagggtcattttacattgttagagtgagaagaaaacaaaagaagtgatggatgacccctttgccgtgtggtgaatttaattagggattgggggcctggttggtctttctccctcactcacgtgttggatgtggagggaatcagaaccacattgaagagagagagtggctgctctcagcacgttgttttcattgtggttaaacctgtggagcctgaccagacaggaccagggtcctttgtggtactgtgcatggtgatggcatcctttatctgaaggctctgaccagaaatgggcttgtagctgccggctcagggctggtgcttatgggaggctcagatgggagctttcactgagtcttcgtggacctggagaggagagtgctcactgaatgctctggggtagagggtggagccacggggtgatcactgccctcctagaaggaaatcaggtggggcctggtatgggaagcaggagtctggtgcccgggaaagaggaggatgttggaggaggggaggaagacttggctgtgctctgtcagctcctagagggcagggctttccatgtcgtccttctatctgcccagcatagcgtggcacagggccgagtcctgagaaagcaaagaccagtgctcttgcctggccccccaccctcagctcttggcactttccacccgccactctgctttgaggaaactgaattgctgcagttcagctaacaggctgcatgttctctcactcctgcgcccttgtacgagctgttccctttccctgaaacgctctttcacttctttgactaatgccctggccccagcacagtcaatacctcattaacaaaagtgatcaagaccaccatgctactctgtcccctcatgatgagctattgaatctgcaaagcatgaaggaagaaaagttgctattgtagccatctctttttccacctgtgggtgatactgtttggagtggctggcccaggctctccctgccttctgccagcagcccaggaattaaataagcaattaaatgcttcgccattctgcccaacagagtgaggtgtgcaatattttttcttagggcgaagggaagaagctgttcagagggcttcagagctgcctctaggggaggagagctgaccccagccattttggggctagggtagcctgataggttacctacatgattgccacgtcatctctcacccattctaatttccacactattaaatctgcctttcctaacatatccttaaaggggaaataaattaccggcaccctgtacctatagccctccatgttattaccgctaatgtaacttctctggggcagccagacgctgttcatgtttcttagccatttgcacccccaaagctatattgagctatcaagtattcatggacaccattcagacctctcatttttctctgctagttgtacccaaaggtttgagggcagaatgaagcaagggctggctgctttacttggggcttcagctctaccctttccatcccttctttaattaggttatttcatcagaggcggacaccaagcatgacttataattctcgtgatattctatggtgactgcccattatgagtctgtggagatttctgtatctcacttaatttgctagagaatggtgctgggggtggttggttctgatctatccctggaatgtctgtatgtttcttctccactgctttctgcctgctccagggcctccatcacccagttactatagctagaaaactggacatcaaaattccttctccccttccatcactttctacctccccttaacgtcccagtcaatccccaaggctttgggtcacctcccaggcatatcccaggtttcttcacttctcactgtctcttgcctggacctcctaattgcagcaacctcctaattggtctaccccttcctctacctcttaggatctcctagtttaacatgaccctcttaaacctcctagttgcagcagtctcctaattggtatacttcttccagtctttccccttcccctccagagtctttgccacacaaacatcagggtgatactttcttctctgtttaaaaatgcaactttgtatctacctaccagcattaatacagccctatcagcttcagagcttttacttacaaaaacaaaacatcagagatttgtcagtgaggaccctagtatatctttcccagatctcgttctctccttgcctccctagaagtaattacaattctgaatttggtatttttcatgcccatgtgtatgtttttactatgatctgtaagtaaacattacatactattattttgcacatattaaaccccgtacaaatggtatcacactgtttttttccttgacatagtcttgaggtttttccgtgttgttggttcatgcagttctagctcattcactttagctgctgggccatagtctattgtgtacagaatgatttatttgtccatctttctgttgatagatagtgtgtcatctttgcaaagtatgaatcacatcatgtttctcctttgtttacaacccttcagtgccctggttaggaggctgtgcaggaagtgtggccttgtttgcccctgcccatgctagggactgcacagcccacacaggcagatgccagggaggcagtctcaggagtgggaaaaatccttctaatgtaagctaactccatgcctttccttattcccacctagcagtggctgggatttggtgtgtgactaacaaataacacgactctgccgtgttgaacttcaggtcttgggagctgggtatttgccaggctttcatgtgtgtgaggctctcctgcacaactcattcctccctccgtctctccatgcagcacacagccctgggaaggagactctctgagcttgttttccttttctttttttttttttttttttttttgagacagagtcttgctctgtcacccaggctggagtgcagtggtgtgatctcggctcaacctccacctcccgggttcaagcaattctcctgcctcagcctcccgagtagctgggactacaggtgcacgccgccacgcccagctaatttttttttgtattttagtagatacgaggtttcactgtgttgactaggctggtcttgaactcctgagcttaggcaatccacgtacctcagcctcccaaagtgttaggattacaggtgtgagccactgcacccggccactgcgcctggccgcttgtttttcatactgcttactttttcattatttgtttcctgtatcttttccgcaaggacagatggtgagtttgttggaaagtagaatgcagacattgggaattttctggagctgagcaccttagttttaagactagtagactttaggtattgtttcaaattattccccacacattaacgtctccagtgaccttggccaaaggcagtgaaggtcatcagtggtgtacatggcacatagaatgtgccattttctattatgaaaaaatagctccaagcctgttttacctgatgggccactgatattgtctgtaatttggaaagtatgattgatctattgatactacaggtcacatactgcagttttgaaaaagaaatttatgattcatgcgaaggttttgaggtactggatgaaatctactttatttcaaacaaaagtttttatgttcaaagtccaagtacattagacttcttagctaaaccctagagtacggtttgtgtcttagagtctactgatacagaatttccatcatacagcaggccttctctggaaaccagtggtatgagatcctgtggtttgcttagcaaagattatgaaaaaagagaatggagaagattagttagatacatattaactaaggacttactctgggctttgaaagctgtgtgttaacttatttattcttcataaaacccatgtgaggggatgttttatgtttctcatttttcagaagaggaaacactcagagaggttaagtaacttgctcaagatcccagccaagaagagttagaatcttctttctcccatatcctgttgtttctggccctctgtagcttctagctgggaaaataagacagaagaattaatggagaagagaatagaagacagccaggaacattctgtatccccagatacaaagggtagacactgacaggaaggtctttcaaggcttgcttctccttgtctgggacaggcttatttcctaaggctctgaaacaggtggacctcaaaatgagttctccttggtttgctcagaaaatatacatagacctgtattcattgccagtgtctggattagacagcagccctgctccatcttgacctcagtctcttggaggaatgggaaggaaggctgcagatgaaaaggagctctggggaggcaagtggtttgtcaagctttcctgaaatgtgacatgtgacctgaaggacctgaaggctggtagacagggtgggaaaaggatttcaggagagggagaacagtatgacaaagattccaaagtttagggagcacagagtacaggcataccttagagatactgtgggtttggttccaaaccattccactaaagtgaatattgcaataaagtgagtcacacacattttttacttcccagtgcatataaaagttatatttacactattccaagcagtaggattatatcttaaaaatcaatgtacataccttaatttaaaaatattttattgctaaaaaatgctaaccatcatctgaaccttcagagagtcattgtctttttgctagtggagggtcttgcttcagtgttgatggctgctgactgatcagattggtggttgctaaatgttggggtggctgtggcagattttaaaaataatacaacaatgaagtttgctacattgattgactctttcacaaaagaattctctgtagcatgctgtgctgtttcatggcgttttacccacagtagaacttctttcaaaattagtcaatcctctcaaactctgctattgtttaatcaactaagtttatggaatattctaaattcttcgtgatcatttcaacaatgctcacagcctcttcaccagcagtagattccatctcaataaaccactttcttttctcatccataggaagcaactcctcatctgttcaagttttattaagaaattatagtaattcagccacatcttcaggctgcacttctagttctcttgctatttcctccacatctgtagttacttcctattatgaagtcttgtacccctcaaagtcgcccatgagcattagagtcaacttcttccaaatatctgttaatgttggtatttttacttcctcccgtaaatcactaatgtatttaatggcatatagacttatgaatcattttcggaaggttttcaatttactttgcccagatccatcaggagaatcaatatctatggtaactatagccttatgaaatatatttcttaaataataaggcttgaaagtcaaattacctcttgatccgtggcctacaaaaagggtgttgtattagcagacctgaacacaacattaatctcctatatattttcatcagagctcttgaatgaccagatgcattgtgaatgagcagtattatttcaaagggatctttttttctgagtggtaggtatcgtaaccgtgagtttaatatacatagtaaaccatgctgtaaacagatgtgctgtcatctgagcttcgttgttccatttttagagtacaggcagagtagctttagtgtcattcctaaaggccctatgatttctggaatggtaaatgagcactggcttcaacttaaagttaccagctgcattggctcctaatgagagggtcagcctgtcctttgaagcttggaagccaggcattgacttctcctttctagctatgaaagtccaacatggcttcttcttccaatagaaagttgttttgcctgcattgaaaatctgctgttgagtgtagccaccttcaccaattctcttagctagatcttctggataacttgcagcttctccatcaccacttgttgcttcaccttgcacttttgtgttatggagatggcttctttctttaaacttcatgaaccaatatctgctagcttcaaacttttcttttgaaatgtcctcatctttctcagccttcaaagaattgaagagaattagggccttgctctggactaggttttggcttaaggaaggttttgactggtttgattttctatctagagcactgaaactttctctataccagcaataaggctgtttcggttttctgtaatttgtgtgttcactggagtagcacttttaatttccttcaatcatttttcctttgtattcacaacttggctaaatgtttggcacaagatgcctagcttttagcctgtctcggctttcgacatgctttcttcaccaagtttaatcatttatagcttttgatttaaagtgagagatgttggacttttcctttcacttgaacacttacagcccattgtagtgttattaattggccgaatttcaatattgttttatcttagagaatagggaggcctgaggagaggaaaacagatgggggaggagccagtcaacggaccagtcagaacacataaaacatttgttgatgaagttcaccatctcatatacatgtggttcatagtgccccaagacaaatacaatagtaacatcaaagatcactgatcacagagcaccctaatacatataatgataatgacaaagtttaaaatatttcaagaattaccaagatgtgacacagagacacaaagtgagcacatgctgtttgaaaaatgatgccaatagacttgctcaactcaggttgccacaaaccttcaatgagtaaaaaatgcaagatctgagaagttcaataagcaaagcgccataagataagatatgctgtataggcagaaagtggtggccacgtgtggctggagcaagcggcaagttgggggcaggtgtaagatagggaagaatggggccacatacgtgggatcttggatagcatagtaagagctcccaacctttcttctgccatgattcacctgactcaggatgtcctgtggacttgcctgggctgatgctcacctaataggattgtaactcctcttctctacactgctgctaagcaagagatgtgttcttatcagacaaccttatatttgctccaaggggtggaaggataaccttctaaaaactcccgttcttgagccattgttacttccactaatttatgctaactaattacttggctatctcataatggatcataacccttccatgtgtcagaacaccactactggtagctttttgagggcatctgcagggaaatcactgagagttgctgaggggaagtgacctgaacagctttatcattctcttttttaggctcccacataactatacacagatttctcctattaacatattgaattttaatggttcctgtcttgtttagcagtgacagccaccaggagcatgcctagagtgagcgtaccgttgtgtccatagtgcccagcacagtgcctggtacacgctgggtactccatacatgtatgagttacagttgcgttgggggtagataacaatggcaaatgggagggagattaagcttgaacccaggaacacctcagtaaggaggtatttgctatagatgagaaattatgataggttgctggagaaggggtctgattggagtggtaactagagggtagaagggtgaattgagatgtggggagagaaaggacaacactctaaatgactaagtttctggctttgttaactagataaggaatgtagaaagaagacatgaacacagaaagagaaagcatgaggtaaacactggccccagcttgctgctctgtttccagtgaatcaccctggggaggaggagaagcaggctgctgacagatgagcctggagctcagggttgaggtcgggcctagagaaatgtctgggagtcgtcagcatgaggctggtatttgtagccatggagtgggcggcatgctgcattatcctttcagggagtgggacagagggataacctagggcaggaccccaaggaacagcaaagcataaggaataacaagagggatgagagtttacaaagagaccaaggagctgccagagaggtgggacgtggactggatggggcaatgtcacaatatcacagaaactacagggagtaacacattcaggagggagggagacatgatcaggggccaaggggctctgagagccaggccagatgaagatgttgatgtggcctttggagttaatggcctggaggtcattggtcctctggtgagaacagttttgtgaagtggagtgacagggagggaagccaaggggaggaagcgaggcagtgaagacagtagctatacactggatggagaccagcacctagctcactgccttgtgcctcccaggctggacgtttgggaatcctgagataattgaaaggagtgcagagaacacctggctcacagactggaagtcttggctccacttgggtcagatagcccttatataaatccaacccagcaaatgaaatttcataaagacacaataactgttatgtcctcctaagccccatgtcttctgtccccttcccattgccttgtgaagctagaggaaagttactgatgttatcttgtccagtttggtccagggctttgaagatgttttctttgagtggaattgagtccttccaagacaatgctggtgacagtggatgaaatccaaaacagatggctgagcaggagcagtcctagcccttatgtcactgtctagccattgatgcaatccccctataccccaaacgggcctatgcaaagggaagggtggctcataaaagtgttctgctcaacttagcatatctctgtgatcatgtactgatcatgtacattatctcaatgatcagcagtactacttctccaccaactccttcaagaaggttggctgtgaaaggacaatgagagaggaaaatatctgaagggggatatgggactgagagttgttaaagacggggtgactcaagtctattcagctgtcccacctccagatcaggattttcagaaggctttgtgcttgtgaggacaggaatttttttggattcccaataaccatctctattctgtggcacagataaatttggtctcaaagggaatttgtttcgatacgctgcctttcccgcttctgcccctttagaagacttcgtttctcatggcttatcaggatggagcactgtattttgttactgcctgtcttgtagcaataccacattcattttgttttcaattaccaagatgtactttgaaaggccttatctagcagagacacagcttgcatcttccctgtgcagtatttctctgtggtcctgcaggggcctccttagatgccagcctggctcacatctgttttctgccccttggtgagacagcctcctctcggcaccctggcaccacggtagtccatcacctaatctcatgcccatcccaccatgttctctgcattccttctgaagattttatttatttctttattttattaagacttaggagcctcagaaggccctagatggaaaagtgatggctacaaagctgtcaggtattaaagtcatacaagtgtagctaattcgtccgtttctatttcctgaattaaaaagagaaatgcaacaaattaaactaattgctgagactcctttggtgctagaaccaagccatctgtgagaggagttccagggtcctgcctcagctcatgacctgcagctcagctctggtgacaggtggtgaggggcagctggtggctatcttctggtggcaggttcttctggcctcagtcttggagcaagtaaatttgaaatgaatggagtgtaacctgtgtaatcccttcataggcctccaaaggaaagagaataagaaataaaaaagtctctggccacccaggatataaaagaggcagtttcttttctgtttcaccttctccaactcttcttccctccccctctcccaactgaccctttccattttttcctctctctgccctgacttcaccctgttcctccttttgtttgtcatttcattcattctctctgccccatttgctgtgctaggtgctggatacagtggtcaacaagacagacaagatagtctcaagcgtagttaagttctgcacagggaatcagcaggtgtcagtgatggagaatgacagggacagtgtggtgaggagtggcatctctgaggcggggacatgtggatgagaaggagccaagcttgagaacatttgaggggcagggctcagagggagctgcaattccagggcctcctagagaggcattgagagcaagggtcaggagggagagggggcattgagggtggggaacaggagggggtgatggaggagttggagagaggctgggatgcatgcacctgtttctgatcctcatgaagaagtccgttgtcttgtgctctgtgccttccatcctcattccttgagctgggttgtgatgtggctgccccaatattctctgcactgggctgtgaaggtccagatgccccttgtgatttcatcgactcatggacatgggtatttattttacttgaaactctgcagagctctggccagaacctctgctacttgcccagcagcttagggagggtggtctttaccttctcccaaatggaaaagctttgcccgtgctgggcagcagattccaggagctgatgggacattctggggcgaggacagacccaacaatctgggtcaggagtaacatgtgtgggcccaggggagagaaggcttcctgtggctggatgctaggatctgtccatgagaggagctgagatgcccctgaaccaggcttgtgcctcattggtttcctctgactctggttatcagaatcatgtctactgtgtgcttatttggctagcctcttaaacagagccgtatgcccttgggagaaagctgaagctcagatgctcactgcaaaagcctactttacatggtcattgaggaaagcaaaactacacttaaaaattggtaaaatttgttcttgtcctggagaatcctcctgcttgtggtcactggactaaatcctaaggccacaccttagcaattgttgctgacaatcataatagcacagaagcagtcaataatgtcgggcatcagccactgtgctaagtgtgttggctggattgtctcctatgcgatagataatagtcacagttctgtgttacaaataaagggagctaaagcatagagggggatgggtgactttaagcaagtcatcctcctgggaaagaatggagctggaattttaatccaggcagtctgattctctacctctgtgccttcctgcctgctgatgaggagttcctgagaggctaagcaacttgccaacgtctacacagccagcgagggctggaaactggactcacagctagcctttcgagagattgaggctctctcagccttccctgggctgcctctagtgttctccaggtagctgatgacccacagcagtggctaccaggtcccacccctagaccagtgccaaacaggctgcaaaagtcctctggagaacttaaaagtacagaatcttggtcacaaccaccaagattctaatttcagaaggtgagatataggaatcaatattttgttgtgaagttggatttgagaaccactgacccagacacttacactgttatttccttgaataaactttctaccctgatctctcttcatcctctttaaggccaataactttctaaacagggaaccatggttttcaggccaggatgtcttccatgccccttttatagacttttttcctgacttttttctttgttgaattagccattcatctttctgtgaccccatgcatgttgcttcataccatgtgcggaccttagtgcctgctcattcttctttgccaaatgtgactggggatgagtactttttagtctttttattcatagtgtctgccacatagtgagtataccataaagattaatgagattgatggatgcttggaaggatatatttacatgtaacaaaatggcctgtgtttgcatgtggagttacctgttccttcccggtagagactataggggatgtacatgaggttctcatgcttcagttattgccattcagatagagaacaccagtgcaggtgccttgtacctaatgaacacactaggagttgtttttcaaattgtgggtgtggctctgcactaacccatccacgctcctttaccaggcctccatggagattggtgacctggaactgaaaggcaggtggccagagctgcgggcatgtgggtctagaggggaggagagtttcagcttaggagcttagcctgatggtactgtggccacttctattgagcaagtgaagacctttagctcagggactcttgactgagcacctgcagcaggccaacaccccatgctggccagagggatgggtcagaccatctctgccctcaaggagttcacagtctggcaggcaaacccagaagcagaactgctgacccagaggtttagtgtgaggagggaggtcactcagacaagggctccgaaatccagtcaggaatgtggggtgaatccaggctgtctctatgtgaactccagccagttaagctctctggtctccctcattgtaaagaagggattataatagtaggtacttggtgtataccaataggaaacactggcaaatatttgttgaataaccaagagctgagacattgtttaggaaaagtttcccagaaaaggaaatgtctgagttttgttttgaagaatgagttaagattcagcctggggaagggcgtttcagatggagggcactgcaggagcaaagacccggtggtgtgtgaggtagatgagggaagctactggcagttcatttattatctggacattaagttttaggtgaggaaaatcacagctgatgaaggccagagagatgggtcctactgagcaatttaaactttattccagaattgatggtatccattgaaggatgcagggcaaaaaagtggcacgattgagcctacacactttacacagtctctataagaaagaggccttgatctctttagctgtgcattgatcaacctggggatctgctcctttaggcccactgctgcaaaactatttgcagattgttgtcttcatgtccctttttgctaccagtggaggttcagcagaggagtgccttggggcctggaccactgggagcatgtcaacttcatggccaggtcctgtctaccatgccctgcagtctcctgggggatgaaagggaatcatcaagcaaatcctaatcagatttcccaggcaggcatctgcccagcccgatttagattatcatacattatcctcagctcagagaactggtgatggtggcaagattagcttacactttgcatttgccctgggagtttacacagcagtaagcctgtttgtcagctaatgctccaaagtttctagcgcccgtggggaccctgtttccagctctgtttaatgtttaattcaaatacagcaaatgagaggggcagagctgatggcaagctgcagacttctgggtttgggaaactggccgtggggcccctccaagtccagccctgtgactgtttctcccattccctgaattcagcctagagttttcatttctgaggcagaaatttgagagagcctcattttgtgagcagaaccacagccccctgttgattggtgcttctagtccatcctagtcctcattgctgatagaatgaaggaccctaaagcagatacctttgtgtcactacctgcctcagaaactaacagtagctctcactgattatggaataaagtccaaacttaatagcccagtgcttcatgttctatctgcagactagacccttgtacaccacccctccaccttcctctcctgcctctgtttgcccatgctgctgcttctcattgctacctgttggaaatcttgtatgttcttcggtgcccaacttgatactattccttccatcgagcgttttcacttctgttagtctgcatccttgtttcccatttggtgttttaggaccggtgttagagtcatttgtgagattggaactccagactagaaggcccttgaactgatgatcttggtgtcacctttattccccatctttctgcctggtgcccagcccaaaacctcacaggcagctcatgatatgtgtgtaagattggattcgattccaagacaaagctggccaagccatccacttatcacccatcatttcattttttcattgtgaggaccaggtgaatgaacagctccttcatggcctttctgtgttgttccactatcccaatgcctaaaccctgggggcttctattttgagactgtttgtcagagactgggaaggaaaacactgaagaggggaaatgaggcctcctcacagctctgacctgaatattctagaattggctcacctggttttcttttaactaaacagtgggggttcttggccatagctgagatgtccttggggtggtgaacggaactgtcccaaggaatcaaacgaccccctggtacaggtcattgtcagtcctgagtctcttagtagcagggtctttgaggactagaactcactggtttcagtttaggaagctggaaatttctttgaatttcatgttccctcctgtgaaatgggatactaatgtatagctcagagccattgaggaataagataattcaggtgatgtgtctgatgcttcagagagtcaagtatctcttctttgtcacctacccacccccaccccagtcatgacccccttatctaaacccactgagggtagagttacaaacattattttacaaaacataatattaatactagcatcttacatgtgcatctttttgctgtacaaaacatgttacacttggctcaacaagtgcttgcatgtgctgtgtgcctggtgctcctggccagccatgccgtgcaggtaggtacagagatgattaggaggcaggtgctagaggggtggagaaccggatgcttgcctctgccagatccaggtagattcccattcagctactcaatggctgtgtgaccttaggcaagtggcttaacctttctgagtcttttcactataaggttgagatgctagcagtcacattgtagtgttattctgaggatgaaaggagatacctcctgtggcgctctgttgcctggcatcagtgagggcacagtgatgtgtgcagtggcaaggtaggaggggttggggcctggtcttcaaggagcacatgacacaagggggtagaagacctcatctacatttaatcctcagaaaagccccaggaagtagtagggacagtcttattaatccccccatttttgttttaagtgaagtcaggggactgccccaagtctcatgactggcaagtcattaggtggggcttggagcaggtcttatacctcatactcttggctacccaacctcaggaatgagttcccctcaatctctgctggagatagagcaaggcaaacaatctgttgtcatgctaggcagtattgaggctgctaccggggggaatttttggtcaaaaaggtggttaaacaaaaaggtgtcgtaagtgggtgatgggaccccctcccctaagaaaagagtggtttccaagtgcctagggtggtctgataaagcagaggggaaattggatgacctctgaaggtctgccagccctgggagcctgtaattcaccctgtgtgacagcttaaatgtgtaagttaactaattggtagcattatgtcctattaagggagagcaaatggctgtgccttttgtgagacaaaatcagacctgaaatcaaatgccctcagaggaattcagagctggtgcctttatttttagatcaaattgggagaaggggacagatattttgttgtttttcactggatatgggtagaaaccagtccctttatttttattaaaccactatagatgtggttcttagcagactggggatggattctgcctttttgcacagtcctatttttgtaataaaaacttgtttttgatgtcggaggaaaaataacatcagagtttaaataggctgaatggccttagaaatactctgtagtcagtcatgtattagccaggttggaaacggaggaagtcaccattccctacccaacacaccattgttatccaagtacctgctcttctgggccaggcactgtgctagtccttggggatgtggagggattcttagccatttattaaggttatgctgtactactatcttaagcctatcccaggggatatagtggtttacacggtagaaaagatcactgctcttgtggatgtgccttctactgggccatataaacaaagtgtctctggtgggccagcccagatgcaggtcactggcagtcttagtctgaacaaatcttcatttcttatttctgcccccttctcacttgagggtgcaggactggtgtgagggtggccccagaggaaggggagttggttgggctggtactagactctgtcatttgttttcccttcttcccccgcagactctgtagagaaagaaacttcagcatttgagttcacttcttgctctggtattcagtcatgtgaaatgtcaagtcacttggcctctctgagcctcggtctccttaaaagcaaggtgtggataaagatgcttcctcatgggaagttgtaagaatggattgcaatcgcatgcccggtgcctaccagacatcaaaaatgtgaggctttctctttttgcccgctaagaaggtgctgccccaacagtgctactcatgtaactgagaactggaattgttgggaaattctatcccttgttccacaaagtatgtgtttaccatgtgccaagcacaggggattgagagctaaacagacaaatttccctcactcatggaactcacattctagcaggagaatcaatgtgaaataaccaaacaaatgtattggccaattttagggcagtgtcttggtgaagcaacaggatgatctgggaggcttcttggaggaagtgtcacttgcattgatctggatggtgagatgggctaggggtgaaattgcctcagagattcatcttttctctgctcacctgccagggctttggaggagatttcctgaaggaagccggtgtcaggcacattttcctctcaacatgtggtccttgaggtccttccatttcccttgtcctcaccttttcctagctatactgcctctatttaggacaggagggcatggacttccccagctttatttctcagtccctacttggaaagctttttggttgattccctctttccccaccccctctcccctagagatctcctttccctcccactcctcatttctctcgactggatcacaccaaagacatttcttcttaaaaagactcttcaaagtgaatgcttggggctccccttcttcttatctttgagtccaacagcatttttgcggaggaatactttttttaatgtgcgttaatgttaaagggagttttaaactttgttgtcttagaaaattccattttctttttcctcctttccaagcaccccccaacctcctgaagcccctttcctgaagcatgtattctgatctgatcttctctttgccacgactgcatgattcccacctcttcttttttgtactttcctctctggttttcccttgccctcactttctctgtccccaagctggactccctgagctctttaacccagctgttgccaagggctgttttctaagtgaaggggcctctggtctcctccaaccccagactcctttgaagatgcctttgataacctggggatggcccccagcagacctgtactgcaggacacctatttgcccactggctgaagttgccctgatttcaaagaaagcaaatgttgtctttaacttcacgtggtagattttctctgggaggaatttctgcagctactaagaaaaaagtacacccagcattcattattgagggggagatgctgctctgtgaggccattcattcatctcttttccctgagcatactgtatcccattttctgttaattaattcctttcgtgtctagggatttactcctgtctgtaaggcacagtcccagtttttgggtgctactgaaatttttctggcagaggaggacatgatctgaactttcaaaaaaagaaagcaaatggattagtggattacagttgtactgttatgtactcagacctagtcactgcccttctgcctgccctgaccagacctccaccaccacaaatgccaattaggagaatattataagaagagaaaccagggctttaggattcttttggcatcaattgatgctgcatttcatcaactagataccgcttattagctccatatgcagtttattagcatcatttttcttttctatccatgccagccttcagcctgtctggcccctacagttgatttgtattgatgagaacatcaatttgagttgttgccttttctgatgaagggttcatctttctgaggacttaacaggtatgacgggttcttagagtcatttttaattaccgatgaataaaatgtacctttctagtaaggtaaatatacatacgtgtgtatatacacatgtacctacacacacacacacacacacacacacattgtggtgggggagatttttgtaagcattagaagcctgtcaggatcctgagtctctccattagaacatctcaagtctattttagcaaggtctaaatatcctccaggacatccaagagtcttccctgcttctaggggatctgccaactcatggcaccacccccttgctattgtgttcactgccaagagaatgcctacctgtgagcctgttcaagatgaccttgatggcaaatgctgaagggggttgaggatataccggccatttgtgtgattaaggaacacggtctttcttacttaaagacaaataaaacatcactgtgggatttgctcagtgcttttcatcttaggagcttttgtaagcaagagggttggtagttttaatggttgttgccttagattaattcagtcattaggaagataaagtaaaagtttatattgttggcattcctctgggtttgatatccaggtctagaagtttctttctgtagcattagagttagcataagtatagccaaaaatacatgtgggcagtgcaagcctcctgcctttactattattgcagataaatttttattgtgaaatttgaacaaattatgcattttccccaagaagtcgctgcctgttgcttgccataaagatgtatttgcatgtgctgaggtgtacccacatgcacaggtctaaatggatggtggtggagattggtggggctggatgggatggtttaggagcttttctgagtacattctatatgccaggtgctctgcaaaacactttacatggattggttgctttgttatttgacaacctagtgagaagcgagatagctataattatttttctacttcaaagataaactgaggtcaagtaaagccaagtaacttatccaaggttaaaaagctagtaaatggtaaagctgggattagaacccaaagcctgagcttttaactagtaagctatattgactgacaataacacttaatagaacaatccagcaattccaggaactggcagatcaaatcataaccaacatgtattagtctcctactgtaccattccctggcacaactgtatgctttgcccctaagcagcttaaatgctaattatagactacaacttttgtacttatcaaggggttgaatcagctctaatcatatcacaattttactcaaaagcctcactggcctcctacctatccaacccaccagtgcttcaatggtggcctctggtcctttgatcacatggttttactacccacagtttctacatgtcttgtactacccattttccaaggcccactcctaacaccctcttttccacaaggcttcatgcctggtgcaggtagtaatttctccctcttcataactcatttccatagtaatttgtcatttttctgtcttgtgacatttggcacctttctttttatagttgtgtgaactccttgagggcaggactgaactgtagatttttacagaatgagtgagagtggttctgcaaagatgtgtggtggtcgggtacatgggtttgggcctgtaatgctacacagaacatcaagaaggtggtggtggccttggcctctagcaaggttttatttctagagtgaggggtgctccatggggcatatggtgcctttatgccatcgctctttcccatgggttctggacccctcttttctgtctcagtcattcattagagaacactgggtctggtgaagggccaggacttccctgacaccaaaccataatagtgtttcttccctgatcaataccaacctgtgggttcttgggcctgccagtgaactggctttggaacaaaatatctgatcaagacaaatgctcccttttggaatggggactgtcctgcacattctgggatgatcctttttatctctgccccacggatgcagacacctgagtccagaatgagaggatggacaagcccaggcactggggtgcactgctcatgtgtcaggaccgctgactgcaaaggacagctcggacatggtataaaggagggcaacagatttggttgtggagctggaaattagggcatgtatgaaaaataattaggaattgtagcctcagggaaagaagcctgcagggagatctagtaattgtcttgaagcatatgaaagccaattttaccactgagttaggtcagcttgtctcttccccgtggaggggacagaagtatgtttaagcttggaaaggaatgatttcagctagatgtgcaattgttacctgctggcatgagcaacaaaagtgcttgcattgaagttgcagaaagagtccctctttccagaaggaaagcttaggcagaaacagggagctgtcttagatatgtcttaaacttcctcttgttccctgggcttgctcacttgatttaaatgtgagaagtaccacaataatgtatgtgagagtaagcatgatgtgacatcacttggttaggttagacacagatgcttgtgaatttcttaaagcaggttcagatctcagctctgcctttcatcagttgcataagttagcgctagttttcctttctggacctctatcccttttattataaaatggtaattacacatacttcgtggcattgttgcaaggattaaatgataacaaggatacacagattttagtaactgtttaaggcatggatggtgccaggtatatagaagctagacatttaggaggataagtgttgctcagacttttccctgaaggagtcattaccctggttaaggagatttgataaatgcaaagatatttgtacactgagcagagataggctgaaatttttaggatccttaagttctgacctcatatgccattcaaactaaaaacaatactgaactacaaaataaattcaagaaataccgatttgtattgtatctgatgtttatcatcattctagtccacagcttggtggtgtttagtttttgtttttgaaatatcacagtcttagaaaaatatttttggtaccctaagcacatgttcaggctgctggtgatgaaatggaatagcaattggatcacagcttcaatctctatttcaacaaacaattctttattgcttgatcagtcagcatcttggtggcaagaaacagaagccaactctggttaagaaaaagttgatttattacgatgacaggttcacagaactaccagggggctaggacaatgagcagaatctgagggccctgctgaaggccatacattggaaaaggtcaactctaagggctaccttcttggctgtagtgaatttgatcttgagattttctttgagtcactccttgaagacttggaggtccaagaaagaggtctcgtgttgagttcagaccatgtacctgcccacagcaataccaggactcaggtaaaagaaatatctggtaccttcacttatgagatgagaggcaagcatcatggaagctgcattcccactaacaccatacacaatgggagattgggggcaagaagaaagggagttagatattgggtaggggataaaaaagatggatatcttctgtgcccttgacatgccaggccctgtgcatcacttgtgtcctggtcaaccatgtgcttagctggtttgtagtctgtcttttgcctgtccatgaattttcatcttgtctttgcagacagcctttaggttccaggaggcagggaccctgggttataagctttgtacccccaagtatggcactcagtaaatgcctggtgatcagttgcatcccacttactggattctgaagtgagctcacctccattagcacagacacagattgggtgtccctggggtaaggagtgtattagacattgggagtgtgtagttaagactagaaacagcaccttggcctcaaaaaaatcagcaaatatatctctaggattgcccaccaacttctagcactgtgtgcactgtaggcctagtgtctctggtgggaaggtggaaaaataaaatagactcatcccttcaattgctttattaaataatgcacagatgacagtgcatgaaatattgatgcacagagagctcatcttcctgcaggggagaggggcctctggataattggtttttctacatggcaactgagatagattggaaacattgtgactctttcgctcaccatatcaagccctgtctattaatggagagatagacccaagtgattcttgttttccaaatcctcattatcctgccatcactgaggtatcaaaatgaatggaggggctcaggaaagtactggcgttttcatataaaccagcttgcaggatcaggcactttctgtgggttaagcttgagaaccattctgaccatctttttaaaacttggtagaatcttattttgttatttgtctgtctggaagatttagaaatgttgtgagttgggtgttgagggccagggctgcattgtttggtggaaggggtttaaatgaaataatcgttgactttcttgagaaagctatttcactcaagtgaagtatgacaacctgcattcaaaggccaggtgctcaggccattcactggccacagaggcaaattgttcatggtggtttcgtatgtaagatgaacaggacaggagcagctgctctggtactctcaatggaattttaagtcacagtaacctttatattgtaggcacacatataacatatgtttattagaaaggtacgaggatactgatgttgccctctcagatatgaatggcaattcacactagcatcagtttctctttgtaggaattgttagttgtgggatctgttcataggaaacgagttctgcaggtcaaaaaacggtcattgaatgcataccgtgtgccagcgtgaggttttcctctcttgtctttattattattatttttacttttggtcatttgtaattttttttcccaacaactacttgggtctgagaataaattgaagatatctacatataaatggtttttagttgcttaaaactggtgggtggaatttccttgatccagcagacatttacagagcccacaataccagctgggtcctgatcctccacattggtagcgtggctggccctttcatgtggtggcttcaagaaggtcgcttctcagttaaactcagcaaaagttgatcaagtgccagctctgtatcaggcccatggaagtcagtgggggcatagatatgagcaagatcccctttcggtccccaaggagctcaccatcagggagaaagatatgcaagagtggcagagaggaccatgtgcctttccatgtgtgtagaattgaatatgggtcataggaggctgtcaagacaagagcgtgagttcagaggcgagcgtgatgggagaagagcagattgtcaggacacagtccagtgatgagcatgtagtctcgggtgcattgaggatgcttgctgtctccaaaggcttgcttatgtttgagttccattggaggctcttcccgttcactccataggacactgtccccactgggaacccctagaacatgtgtatttatatccctgctatggggacagtctctcacctggttaactgtgggcatagtctcacagcacagtgattaaggataagggctttgcagtcacccacaggaggccccaagtcacagcctatgattctgtgcactcaggtgagtctcacagcctctttgagctttagtttccttatctttaaaatgataacagtggtagcacctgcattagtcatcttgcgctgccacaacaaaataccatataatgagtggcttaaataacagaaatttattttctcatagttctggaggctgaaagtcttgagatcagggaggcagcataattagctcctggtgagcgcctcttcctggcttgcaggcaacttgccttcttacagtgtttacacatggccttctgttagtgtccacagagagagagagagagagagagagagagagagagaaataacaggctcattcgtgtctctcctattcttataagagcactgatgtgatcatggtagctctacttcatgacgtcatctaaccctgatagcccaaagtccccatctccaaatatcatcacattaggggccagtgacttcaacatacacattttgggagggacagaattcagtccatagcagtacctgcttcatttggttgcttttagataatgcttgtggagtgcttggtccagtgcctggaacaccataggtacagtcaggcctgtgggtccaagggttctgcattcccaattcaaccaaccatgaatcaaaaatattaaaagagaaaacaaaaataaaagtacaatggttaaaatacaaataaaaacaatataacaactatttacatggcatttacattgtatcataagtaatttagagatgatttaaagcaaacaggtggattatggaggttatatgcaaacactacatcattttattatatcagggacttgaccatctgtagattttgggatctgcaagggtcctggaacaaattcctcatggatactgaaggacaacattactctgtgaatgttaacttctgtagttgcatgggtatatctcttttccctgtaaaattttgagatacttaagtgaggcctgtattttatttgtggctttctgccagaaatgaatgctacagtgaagatgtgggtgaaaggagaaagacaagagattttggattcagaattgtagctttgaatcttggcctggctgtgtcctagccacatgctctggggcagtggtcaaaactctgaacctcagcttttcatattggtaaaatgagaacaacacatcttacttcccagacttctgatgaggactaaatgagataatccatgtgaaaccacctgtattttctgatacatagttgatgttctctaaatgttggtgggatgaggtttaccggtaaagtattcattgatttggcacagttaattaacttgtagtcttaactcctatgttgctctgactctcctgcccttgatgtgggcatctagatccagtgggtgtgtgtgcctgggcagataggcatttagtgaaatttcttaaaattaatttttaattttgtgggtgtgtagtaggtatatatatttgttgggtacatgagatattttgatacaggcatgcaatgtgtaataatcacatggggacaaatggggtatctatcatcttaagcacttatcctttgtgttacaatccaattatgctcttttagttattttaaatgtacaattaatttttttgacaatagtcacctttttgctctagcaaatattaggtcttattcattctttctaacatttttttgtgcctatttaccatccccacttccccccaacccctcacaacactttccagcctttggtaaccatccttctattctctatatccatacattcaattgttttaatgtttagctcccacaaacaagaacatgcagtttgtctttctgtgcccagccacttcccttaacgtaatgaccatccttgttgttgcaaatgacaagatctcattcctttttatggctgaatagtactccattgtgtatatgtaccatgttttctttgttcattcatctgtcgatagacacttaggttgctttcaaatcctggctattgtgtataatgctgcaataaacatgagagtgcacatatctcttcagttaactgatttcctcctttatatacctagaagtagaattgctggataatagtgtagctctatttttagtttcttgaggaacctccaaactgttatccatagtgattgcactaattcacattcctaccaacagtatactagggtttccttttcttcacatcctcgccagcatttattgcctgtcttatggaaaaaagccatcttaactagagtgaggtggtatctcattgtagttttgatttgcatttcgctgatgatcagtgatgttgagcacctttttatatacctgcttgccatttgtatagtcttcttttgagaaatgtttattcagatcttttgcctatttttcaatcagattattagatttttttcctctagagttgtttgacctccttatatattttggttattaatccctttatcacatgggtagtttgcaaatattttctcccattctgtgggttgtctcttcactttgttgatagttttctttgctgttcagaagctttttaacttcgtgtgatcccatttttccatttttgctttggttgcctgtgcttactcaagaaagttttgctcagtccaatgtcctggagactttccaccaatgttttctcctagtagtttcatagtttgtggtattagatttaagcctttaatcaattttgatttgatatggtgagagataggtgtctagtttcattcttctgcatatggatatccagttttctcagtgccatgtattgaagagactatcttttccccaatgtatgtcttctctcttttttctttgtcagtctggctaaaggtttgtcaattttgtttatcttttcagaaaaaccaatattttgtgtcattgatcttttgttttctttgtttcaatttcatttatttatgctctgatctttactatttcttttcttctagtaagtttgggtttggtttgctcttgcttttgtaattctttaagatgcattgttaggttgttttttgacatttttcttcttttttgatataggccattaaagctgtaaaattccctcttagtattgcttttgctgtatcccatggctatactcataggtataggtatgttgcatttcccttatttgtttcaagaaatttttcagttttcttcttaatttcttcactgatccactggtcattcaggagcgtattgtttaatttccatgtgtttgtatagtttccaaaattcttgttattaatttcaagttttattccattgtggtcagagaagatgcttgatactattccaatttttctgaatgtttcaagttttgttttgtgacctaacaaaaaaggtccatccttgagaatgatctaggtgctgaaaaaaataatgtgtattctgcagccattggatgaaatgttctgtaaatatctactagattcatttggtctatagtgcagattaagtcctatgtttttttttgttaattttctgtctggaagatctgtccagtgctgaaactggggtgttgaagtccccagctattattgtattgggtctgtctctttctttagatcaaatatttactttatatatctgggtgctccagttttgggtgcaaatagatttataattgttatatcctcttgttgaattgacccttttaacattatataatgaccttcttggtctattcttatagtttttatcttaaaaatctatttcacctaatgtaggaattgctactcctgctcttttatggcttccatggcatgaaatatctctttccatccctttattttcagtctatgtgtgtctttataggtgaagtgtgtttcctataggcaacagatctttcagtgtttttttaaatccattcagccactctatgacttttcattggagagtttagtccacttactttcaatgttattattgataaataaagacttcctcttgccgttttgctatttgcctcctggttgttttgtggccagccttctttcccttctttccttcctttctgtcttcctttaagtgaaggtgattttctctggtgatataatttcttgccttttgttttttgtgtattcatcatatgttttttatttgaggttgcaatgaggcttgcaagtactatcttataacccatcattttaagctgataacaacttactgcttgcataagcaaacaaataaacaaaaacaaaactaagactctacactataactttgtcccccagctttttttgtttttatttatatcttattgtattgtctgtgtcttgaaaagttgttgtagttattatttctgattcattaaccttttagtctttctatttaagataagtagtttacataccacagtttcagcactataatattctgtgtttttctgtatatttaccattgccagtgaattttgtaccttcagatggtgtcttattgctcattaatgtctttttttttttctaattgaagtactccctttagcatttcttgtaggaaaggtctggtgttgatgaaatccctcagcttttgtctgtctgggaatgtctttatttcatttttgtatttgaaggatagtttcaccagatacacttttctagggtaaaaattttttccttcagctctttaaatatgtcatgccattctctcctggcctataaggtttccactgaaaagtttgctgccagacacattggaactccattgtatgttatttgtttattttctcttgctgcttttaggatcatctctttatccttggcctttgggagttttattattagatgtcctgaggtagtcttctttggatttaatctgcttggtgttatataaccttcttgtacttagatattgatatttttctgtaggtttgggaagttctctgttattatcactttgaatgaactttctacccctatctctttctctacgtcctctttaaggccaataactcttagatgtgccctttcgaggctattttttttagatcttttatgtgagctttattgtttttaattttttttcttatgtgttttcactgtgtgttttcaaatggcctgccttcaagctcactaattcttctgtttgatcaattctgctattaaaagactctgatgcattctttagtatgccaattgcgtttttcaagtcagaattcctgcttgattcttttaaattatttcaatctctttgttaaatttatcagatagaattctgaattccttctctgtgttatcctgaatttctttgagtttccttaacattttgaattctctgtctgaaaggtcacatatttctgtttctccaggattggtccctggtgccttatttagttcatttggtaaggtcgtgttttcctggatcatcatgataattgtagatgtccatctgtgtctgggcattgaagaattaggtatttactgcagtctttgcagtctgggcttgtttgtgcccatccttcttgggaaggcttttcagatatttgcaaagacttgggtgttgtgataaactgtatatcctttagggggacaccttaagctcagtcatgctctggttttgtagactgatagaagtaccaccttgatggtcttggacaagacccagaattctctggattagcaggcagagactcttggtctctttccttgctttctcccaaacaaacaaagtctttctttctgttctgagccatgtggaggtgggggtggagtgacacaaacatccttgtggccaccacccctaggaccacactgggtcagatgtgaagccagcacagtactggttcttgcccaaggcctactgtaaccacttcctggctatggcttatgtttgctcaaagtcctggggctccccaatcagcagatagcaaagccagccaggtctgtgtccttccctttagggtggcgagttcccccaggacctgggcaggtccagaggtgccatctgggagccagggactacagtcaaaaaccttagacatttacctagtgttctattttactgcatctgagttggcagtcagaccacaaggtacagtccttctcactcttccctcccctttccaaaggtagaacagcctcaccccattgccaccaccatcacaggctcacagggagtactgccaggctaccgttgatgttcccttaaggcctaagggatctttagtcagtttgtggtgaaggctgccaggcctgggactcatccttcagggcaatgggctctcctttggcccagggcaggtccagaaatgctgtccaagagccatgacctggaagcagggattccaagagcttgcttggtactctatctcactgtggccaagttggtacctaaggtacaaaagaaagcctccctgagtctctcactgtagccaccacagctgggaatgtactgggtctctcctgaagccagcacatcttagagcctcacctaaggcccatagtgagctacctggctatcactgctggtgattcaggatccaagggctctatattcagcaggtgttggatctttccaggactgggtccttcccctcaagacactgggtttccttctgtcccatggtgtgtctagaagtgtcgtccaagagctacagcctggaattggagcctccccactgaccggtgtgtggctgagcttgatgagattcttggtagggataagaaaaaaaaaagacaaacttaatctggtagagaagtaatgacttagatcaagtattcacatagaaaaatgggttattttgaatattcttggtcccattaacaaaatttaatctagtggagagaatttatggggcagcaagcaatcagtcttgcctggtagtgctcaaaagtgcaaatgaactcttcatatacctctctgctttcagagtttaacagcatataagcatttacatttcaaacaaggtggcccttactccagtgtgtgaaatatgtggtctgctaacaatttaaattttttgagaagctactttaaacagaaagaaatatgagcaatatatataattaagataggtgtttgtatgatatgagatcttatagagaaactgtagctgtgccttggtaaaggaacagggaaattgagagtcacatgttgtcctgaagtagctgccatactgagtgattgatcttagctccaaaagcttagaaaatctttgcgcgatctagcctggtcactaagagaataggccttgaaggctgacagacctgagggtgagttccgctaacttggactaattattttatgtcatcaaacccaagtttttgcatctataaactgggataatgatgtctacttcaaaagattattatgaggatttagtgagatggtaagatagcatcctgcacatacatttgtatccaggaagtgttggctgatgttattattactcttctttcattgcctagtaatgaactagttagtgacctatggaatttttagagcctgaagtcaaatgtcacatcatcctaaaatatcttgtataaaggtacttagggaatttgcccactgaggtctttgagccctggagggtaccagatgtatcttagacttctgtttatctttgctgcctttccctggcagccacgccacctctcttgcctatatcactagaaagagtcctgtggcagcaggggatttttcttttccatttactgctatatttccagcaccaaaaccagtgcttggtatatagtaggtgctaaatacatatttgttgttgaataaatttactggcttctcacttcccatctctcttaattaatttaaaggccaatggtagtttttggagcaatgtttccttttctgttttcattaggatcagcatgatacagtaggcagaacactgggctaggggtatgaggccagagttctagtttcagctctgcagctaacttgctaaagaaccttggaaaagtcagccttccctttctgcttctccattcccaaatagcgtcacaaggaaattggtttatgtaatttcttaaagacccttccaacgctgatgtggaataagtaggctctcaggagattctttagggacatgtctcagtttcctgtcctcttttcttatgcctccaacaactgccaggttcatttatttccttcttgtctcccatacagaaatcactgtagccccagagaagtttttaaacaatagcttctcccagcacatcttgtgtatctaagctagagtttgtcgactttataactacagacatttgggccacataattctttgttgtaggggaggaagctgtcttgtacattgtagaatgtttagcaccactctggcctcaacccactagataccagtagcatcacccccacctctgcacacagttgtgacaagcaaaaatgtttttagaggttgctaaatgactaccgaggcagggaaagggaaaaatcatctctgatttaggcacacattctttcatagtcttatttcagaaagcattataaggccaggtgcagtggctcacacctgtaatcccagcacttcaggaggccaaggcaggagaatcacctgaggtcaggagttcgagaccagcttggctaacatggtgaaaccctgtctctactaaaaatacaaaaaattagcccggcgtggtggtgcatgcctgtagccccagctagtcgggagaatgaggcaggagaattgcttgaatcctggaggtggaggttgcagtgagccgagatcccaccattgtactccagcctgggcaatagagccaagactccatctcaagaggaaaaaaaaaaaaaaaaagaaagcattagagactagaacaaatgggaatggtacattgataaggggcatcttttacccctagggagggaggaaaagaaagaaagaaaaacaactttcttaccagcttgaaagtaaagatataaagctagcccaaatattttgctggggatctgaattcacactgagataattctatgcacaatatatcaccaaagatgagaatagggagtgacaactcttagatcttacccagaatatgacagctattggatcttattcttacgtaatggaaattggatagctgtagcattgaatacttgatgaaaaagatacgttttaaaaatcttccatcttgctcacatcttagatacaggcaaatcctggatttttttttaatacaaaaacagtttggagaggacaacattttcagtgcagccaggatgttatcaagcatgcatttattatgaacttgttaataacatttcgtcagcaaaagtatggtactggctgctctgagtgaagtaaaaatatttatataaaataggagctcacaattttgttacaagtaagacaaaaaccaggggaagcatgacacaaaatataaatcataaaaaatgtgtagatgaaagcaatgatgattttatagcctaagcaattacttccgttggagcccaaagaaacccaagtgtggggtcatgttggcaggcaaggtagtcagccttacctggagagagagtttagaggctcctgggcaacatgggatgccctgagtatagtttgtgtaaagcattaggtttactgctgcatttcaactgacatgttccatgccccatatcccatatatatatatggcctggaatatttaaagtagaagtgatcccattttaagaagtctgtattttcttgcctcatgtaactacttctgatgttgatattctttgaagtattttcccacctccaaattatccattctctaggaatagcgtatatattatatattagagatatatatactctaggaatattatatatattatatattagatatatatattatataatatgtaatatatattagagatatataatatattagagagatatatataaaatatatgtaatatatatatatatatatatatctcacagtttcttcattcattgattgatgggcatttggattggttccaagattttgctattatgaattgtgccactataaacatgtgtgtgtgagtatctttttcgaataatgacttcttttcctctgggtagatactcagtagtgggattgatggatcaaatggtagttacatttttagctcttttaggaatctgtacactgttttccatagtgactgtactagtttacattcccaccagcagtgtagaagtgttccctgttcactgcatccacaccaacatctactgttttcttgattttttgattatggccatatatatataacatatattatatattatatattgtatattatataaaatatatattatatattatataaaatatatattatatattatatataatatattatatattatatatattatataatatataatatataatatatattatatatattatatatttttatatattatatatatatgtgtatatatatatagcccaggtgttggctgcatttcaactgacatgttctatgtcccatatatatatacaacatataatatatatattatattatatatatatttcatatatttatatatatttatgttttaaatattttatatatttatatatttatataatataatataatatatataatatatatattatggaatactatgcagccataaaaaggaatgaattaacagcatttgcagtgacctggatgagattggagactgttattctaagtgaagtactcaggaatggaaaaccaaacatcgtatgttctcactgatatgtgggagctaagctatgaggacacaaaggcataagaatgatacaatggactttggggacttgggaagagtgggaagggcgtgagggataaaagactacaaatatggtgcagtgtacactgcttgggtgaagggtacaccaaaatctcacaaatccccactaaagaacttactcatgttaccatacaccaccagtccctcaataacttatggaaaaaaagacttatttgcctccttatgttcaccaaggtaaagaaaagatgccagatttccaataaaatatagacatggattggcaaaaaaattaaagtaaaaataaatgacttcaagggactcaagacttcagtggaggaagtaattgcagatgtggtagaaagagaaagagaactagaattaaaagtggacagttcataattgcaaagatatggaaccaacctaagtgcccattgaccaatgagtaggtaaagaaaatgtggtatatatacaccgtagaatactactcagccataaaaaaagaataaaattgtgccttttgcagcaatgttgttggagctggaggccattattctaagtgaaataacttaggaacagaaaaccaaatactgcatgttctaactcataagtgggagctaagctatgggtatgcaaaagcataaagagtgatatgttggactttggagactcagaagtgggaggctggcgggggtggggctggttggtgggggtgaaggataaaaaactacatattgggtacagtgtatgctactcaggtgatgggtgtaccaaaatcccagaaaacgttaggtttttaaatgatcctaattagctttacttggagacttgtgagacaacatatacttgacattgtcaactctaaggtatttattctatggcctagaatatttaaagtagaagtgatcccattttaagaagtctgtattttcttgcctcatgtaactccttctgatgttcatgttctttgaagtattttcccgcctccaaattacccattctctaggaatattgtatctccatcaaagaaaggaagaagaagaaagacctatgggtgggctctttgtagctgtgtttgcttcctgagaccagcctcccctccctgggccatagctgatttggtcaaggggagcatctgattcctgcaggaccagtcaggtatacgtgatcatttagactgagaatttggatttaggaataagagcatgtcagtctcttcctgttactggagctgggagccatgggcagccatatttcccctgtggagcctggagaagccacatgagaagttggcaatttgccatctctttaggagatcccatcctctgtggaccaggtcattcacctcatccctgtgaagtggatgaggtttgcttgggggtcttctcacacccccaacctgtcctttctccatggtccctcccttgttatggtgcccccgagactccttcccttctgtggcacagccactgccccctttccagctgcactttgtggagtgttctgtgtaaatttcatgacacccattccagtgatatacatagtatttttcatctccagggagcagctttctgtgggctgtggtgttgaggagaatcggctcaccccaatcactcagagccttcacagtattaaggttcagtgtgataacttgcccaggtgttggctgcatttcaattgacatgttccatgtcccaaaactggtttctaaccagagacccttttgaagttctctacaaagtgtgaggctatattgccaaggagttctttggacgttagcaacagaacgtgactcaattgtcacaggaaggttatccaaagctcccagagcctgcgagaggctggaaaaccccaggttggaaatgtgaaaggactaaggggaggccaaaaggctagacagcaggaaccccagtctaatcattgccagtgtcccctctgccctggggctcctccttcacatttcagagtctctggacagtcactgggatggaatcaccaggatggggagaggcaggatcagctggcacatctgtctttttactggggattgggcatttgggaccccacatcacaaaaatgcccataaagttttgtggcaagttttcttttttttggggggatggagtctccctcttgctgcctaggctggagtgcaatggcacaatctctgctcactgcaacctctgcctcacaggttcaagtgattctccggcctcagcctcccaagtaagtggcattgcaggcaagcgccaccacacccagccaattttttggtatttttagtaaagacggggtttcaccatgttaaccagactggtcttgatctcctgacctcaggtgatctgcctgcctcggtctcccgaagtgctgggattgcaggtgtaagccactgtgcctggccccatatgcaagttttaaaccatctaaaaactgttcccagaatcctagtgaccaacctttcatccatagtttctgctcattcatatcatttcagaggttagtgcctggggaatgggattgggaccaagtgattaacagaaaactctatggagagagaaaccatgtagaagccttcctcacttgccagcttttggatacatggtgctaaagacccagcccagcaaaagcactgggaggaagaggtccctttcttgctctgggagtcacctctggaatccaacagcatttagacggcacacttaagactgaaagaaaaaagcagggtccaacctagtaggagggggaaaattctccaggacagaggattgctaaattaattactcagatgcaaaaattcaaaggaagaataatgacacagcctgttaagctaaaaaagaagttatcatgttgtttgccacacagtgaagtaccagggactgggaactgcttttaaactgaagaaaactaatcctcctggagcattcccatccaaattgtcttgggagtctttggaatttgagcagtgtggttgtttattttatgaagaaaagatgtgttcttatggagctctaggtagtgcaaacaccagtgccggtgggaccaagtgggcaattcatgtaagagtgcaggagggaggaagggaccggggcagcagagtgtaaagggggagaaggaaataataacaggatggaggcagccatgggggagtgcaagcccaagtgtggccatatctttctattaaaaataacctaaaaatttatgatagatttttgtgtgatattccttaatttcttactgctaacaccttattttaaaagcattatatgggctggtcaccacacacctgtgggctcagtggatccactcttcatggcctctggtgcaggagggctctggatccacttatgtatgaattcttgctcatcccttctagctgtaggtgcttgagcaaattctggttcttctctcaacaagtttctctgttaccttggctatagaatgaggatgaagggaacacctggctcatggttttgctgtacggattccttgaggtcatatataccaggcacctaccagatacctttcacaggcctgcaattacctgagcacaggtataggccctcccttttcaacatgtatattcaccaccccaaatgatgtagtagtaggtgctcagcgaaactctctgcatgtagtaggtgctcagtgaaggtcactgcttcacacacacatgaattattggttgtcaaactacttcagagtaaactctattctcctattaatttcccttttgaggtcaaaaggtgaggggttgctatggcgatgtgttctcatgaggaattttgctccaggataagaatgcgcaaactctgctgagatagagagggatggtttgaagagtttttggaatttaagcagtgtggttgtttattttattcatgacccttggaagccaggacagcagaggccagcttcacagggcagaccacgttcacatgtcacctcatttttgcagcaatacttggtgcaaaagtattatattgctatgggccctccccactctcagggttcagaggcacttaccctgctcccccaggacctgaggagccaggaatgcaccccaggggccccttacattgtggtgctaccctatctggtgatgctatgtggttttgtcttactccatcccttaatgctactgcctgaaacaggagtaaacgtagtctgaaaagttttcaacttgccgtttagagtcagttgaaatcagtggcctgcttcatcagtccaagttgaaaattctagatgttgacttggcttccaatgagagaaacttttcaggagggagcaaggccgcccagtgggtctgccctctaacagggctttgaacaggcatcaagggcctcttgcccttgttgattggacacagcccacaaagagaccagacagagcctttgtttgtcagagaaaggaacatgccagggagatttgttgcccatttaaaaaacgattgtccatgaaatggatactgtttgaattacacagagacacatcttctcattagctttttcaggatcacaaaaagcctgatggctgttttagtcccagccagtgggatctggtgccaaaaatctctgttacacatttgcatggggaaggagtatttggagaaagggtatccccgtatttcatctcctttctgctgttgatggagtgccatgtatcagtttccagcgtgacctcactgagtggagggtgttaaaccatcctttcacctttccccacactggctaactgggcaacaatagaggccaagtgaggtgatcagccttctgatttctggagttgcaagagtagagtacaggcccattgagaaggggactcaccagcaggggacgggggactgctatggatagcagggccattctggcaccaagggcagctcacaggaggtctcctgggaaatagacattagaggcaacacaatttcaggactgtaatttggcttaaagatgacctggtggagaaatctggagaggaaaaggggcccagtttgggctgctacaactgaaaggaatgcttaaaacggatcatgtgggaaagagttgaaactaacacttaccgaggacttgcaaagatcaatgttaagcatttgacacattgtctcacccagtcctcctgaccaccatatcagggagatgttaccactcctctttaaagctcagagaagctatgtaacttgcccaaggtcacacagtgtgcaaggagctgagctcagatttggaactggctgtgtcagttccacagttcattctcctttgaatgaagcccacagttcattctccttcggcccttcctacataatttctatcacacgtgttggtgatttgcttataggagcaaagactgtgaccaggaagttggtgatctggtttctgtgcagattgttcgcctttagctttggcactctgagcaatggtcacttaagaaccctgtgttgaagcagccccatgggtctgtgagggcattatgatgatcataaagctgagtacagatctggagcaaggccagcccattggtgctgatgaacctcagttagacttcaacatgttcaacagatatctggagactaattgcaccaaggatgcacatgttgatgtgagaacccatcattctaaagatacttcctggtcctggtccaatagtgtgttcttggaaaagtcatgagatctattgctatattttctttatccatcactccaaggccatttcccatcctggggcccttgcaatccctctcctgggattgcactgttcctcagcagatcttcaaaacactggctctgtcttgtcagattgtggcttaaatgtcacctccttagagaggtcttccctgaccacttaatctagagtgaccacctaggagcttctctattatatcactctttttttttgagatggagttttgctcttgttgcccaggctggagtgcaacggcgccatcttggctcactgcaacctccgcctcctgggttcaagtgattctcctgcctcagtctcctgagtagctgggattaaaggcatgtgccaacatgcctggctaattttgtatttttagtagagatggggtttctccatattggtcagggtggtcttgaactcccaacctcagatgatctgcccacctcggcctcccaaagtgctgggattacaggcatgagccaccatgcccggccttattatatcactcttaaaatgtgctgcttaggtcttatcattatctcatgttttccccttacctctcttccttatctatttcttctttcctctccctgccttctttcttttcttcttcttcttctttttttgtttttttgtttttttgagacagaatcttgctctgtcacccaggctggagtgcagtggtgtgatcatgagtcactgcagccttgacctcctgggctcaagggatcctcccacctcagcctcctgagtagctgagactacaggtgcgtgccaccatgcctggctaatttttttcaaaaaattttgtagagacagggttttgctatgttgcccaggctggtcttgaactcctgggctcaagcaatcttccctctttagtctcacaaggtgctgggattacaggtatgagccaccgtgcctggcctctttctcttcccctcttttctttcttatcacatctctactaggtcatgagttccttaagagctaggactttctctgtcttaagcatctctaaattctcaatggttataatagtacttgacatataaaatgagtttcataaatgtttgttgaattgacaaattgaagtctcccctacattaaaaatgagtgtttttattctgtgaaacaaaacaataaaagaaaaatgagtgtgttggtctggaaatactccagggattctcacagctctgaatttttgtgacctggaaatcttaagttattagatccatccagagatgccccttgcacagagtttttcagcattaactgaacatgtcctttacagcagacacatgtcaggggacttgggattcagaaatagtgagcaaaacttggcccctggcctcacagagcaggctagagtagtggttaagcccatggacctgggctcagcaatagttattgaacccccaagatattccagacactgtgttgggtgagaggtggcatgtggcagtgaagaggatagacactgtctttagtctcttggagcttcaactggatttagcagacttacagttacatcccagattggctacttactagttggattatctccggcaaattctaattctttcttttggcctcacagggtggtgtaagaatggaatggtattttgtattgagcagtgcagtcaaggctcaagagacatgaaagcacctcagatgtttgagggtttgtgggttgtccgtataaattaaggcagggtaaatattggatgataaggagaatattggcaggaaatgggaaccacattctggaagggaagtttcaagccagactgtagaagacagagtcatgaggctcctttaaaagaaaaaaattagaatccttaaatttaacaaaaactagaatgtcaacaacccctccggtggaaagaattttgctgccattatagtaaccaaagatgactttctttctgctgtgtcttacctgttaggtgatcagtatttattgctatagaacaaaaaaagaaagattttgccccttgtgtttgttttatgcttgtcttaggaaaccccataggtccttttccattatttattgttgcaactgtcttccatgtgcagttaagccctgatttatgttttatattagcatgatagcccttatcttagctaatgtaagggaagtaattagccattgagtggcacattggtggagagataggtgggaaagagctggttgtgagcaaggcaggaactgcgaattatttagcttatttagatgcattgatgaagtattttagtcatgactgaatagcacagaacacacacacaaaacgtaaaaacagcaagaatacataagacttaagttatacggcacttaccagttcctatagtgggggatgcaaccatttttctctcagcttgaggtggtttctaatagtagatgccccaagaaacttcagctccaatcaacattaactttgtcatgatggcttcaatgttatcagttgaggaatgaaatttaataaccttgggaaccatcctaaagaagcagaaatgaacccgctctaattggagaaagaaagggcttggaaatgaatagtcttcaaatatccatttataaacccacagccaaatgtttctgaaaaattaacagtgagagggatgaaagtagtaacagctttaattttaatatatctggggaactgcaaatgctttgtagctcatttaaatacctcacccagtgcttggcacttacaaggctctcaaacaagctttgaactttgcagagtcagttctctgaaaaactctaggacctttcacctgtgggattgagattcaagggaagagatggtatggaaatctgtttcagggggcatgggatatatttttgattagtcagatttaatgggaactgctttctggtcctgcaagaataaggaatttgcttatgagagttctttgtgtgtacatttactggtattgattttccatcttatgtaacagtaccctggagagcttaccacttcattctaggaccctttaaacttgttccatactttcagcactgctcaaacttttctaccaaagagctcctaatgacaagtaagagcaaatacctattttgaggttcgggggcagaatccactgtgagacgtacgttcttgaagtctcttctatacaagtttatatacattttgcattctattccataatagatcattgattaccttaatataaataagttctagccaggcttggtggctcaagcctgtaattccagcacttcaggagactgagataggtggactgcttgaggccaggagtttgagaccagcctgggcaacatagacagatcctgtctctacagcaacaaaaaaaaaattacaaaatacaaaatataaattttagattacctactaccatctggtaaaatagatgctgcagggagattcaatatagatttgcattctccttggcctaccatatagtctgagaagcaaggattagattggattatgggaacacaagagaaagaagtggccaggctgtgctagatgcatatggtgtaggcctacctgtttcccttcctttagttgatttttagacttgttgagagatgacctcaccagagtgctccactgaagctgtgttccataggctgccatactgcagaagtgacctcttcatctgaggctctgagaggtgatttgagatccctgtttctaatctggggtaggctttccctacagactttcctgttcaattaacacctgtcactgccaggctctgtaggagagggcagaagacattcatgggctgaggatcagaaagccccaaccttatacaccacacctgccttgctgagccctgcctgcccatttgtccccaacataccccttgccaccaaattccctggactccttgtctgcttggatcaacaatatttgccagattctgtttccctaaccaagctcttctttttttctagcctcttaccaacagtgcttgaatgtgggcccttaagataccttaacaattaagctctgtgactcttcaatagtgacatttcaaagcccacagagcttctcctaaaacaaaaagagcatgagcgtaggtttgtgtacaaggctctgttgtgtgaacctagtgcccaaaacttaggagaggaagaggattttcatcctttattcccagcccttactatctgtgggtagagacaaggcagagtacagctctactagagaggcatgagctacttgtttgttgtagggtggcttcatcagtggtgtggatgtggttagtcagcagaagttttcgggacaaagtggaccccatgcttgatgttgaaaagctttaatgtttcttcttatagagtttaccattttgagattggaaagactgaacagaattatggctccaggatcttgtgtttctgaagtgtccagggtcccttgcccttggtggacatccattttctgtattttaggagcaagctaaaaagagctggtaaaagccatgaggataataaatgagcatgaactgtgcgccaggccctgtgctagaaaaccttcatgtgttatcccatcagatcctcacaacatctcagtaaagtggatctgtttgcctgcaactgaatcctaaagagttgagtaacccatcaagatacctcataggcaagaagtggcaaagctgcctctctcctctcaaacttacatctctccgagccaaatgctttgggttcttatcttctaggtacactaaaaatttggcagaaattcttggagttgctgagtttcccaatccttacatgatcaacaaccatggctgctgaataatgtcagaataatcagcaccaaaagagttaattctctggatgtctttggcctgggaaaagctccatgtttttatagaaattttaattgcattaaagtgaagcacaggtacaaaagatagactgtgtgagccacagtgatcttttaagtacacttttttccaggaaatatttgatttttactatgctttttatgccctcttattctcttaggttatagaattggttcttttgtattttgagtaaatctctctcctttgttcataaatgtcttatgaataatttatgtcaattataatgaaatagaacccaaatacctttactattatagcattttaataaattctggccattgtgatggatgagaaggtgaagacttctctgtggatgatatctttttctctacttagaggccaggccattctcagctcctgttgcctacactgccctgtcccatgctgcgctgggcttcatgcatctccccattagcagtgtggaacatacgcacacttcacagaaacccctcacggaaggaaccacagtcagttcacctggtcactattgtttcttaagtcagagggagttaagttcacaggacagcagcattgcctttaaaagcagctcgcacttttgtattcattataaaagtaatacaagcttattaagatagccagcaatttggctttgatttctgatagctcaatctttttttttcacaggaagtctttttttatgaggtcttctgggtaacatgaatcttggggaaggtggacagaggggtgtgatacattgctgcttgacactttaatcatcacctttatccccatcagaagttattttcattagtggcttagtggcttcaagtatcagccttggtgtgagactcgccaagattaaaatccaggctcactggctgtgtgaccacaaacaggcttaacatttctctgtcagttaccagttggtaaattaagaatgatctgatctctgtatcagtttctttattgttgaattaggataatagtacattattctatagttggtcgttgtcattgtctccatgtcagccccctaattgggtgacagagtatgtaatgttctccctccccttcctttctatttaattccccctttccttctacttcctctttccactcccatcacactttcaaagggaaatcaatttcttgatggaaatgctgagtgagggtccttgtcagagcagctggggagcagggaaaatgtgagatgatagctttgagaagggaggcttggctgcccaggctaataaaattttgtggttgttgattttatgacacacatttccacagctgctctggcagacccctcttaacgccttcttttctaatgatcaggacatgtaaattaccatgttgggcttatcagtggttgctcataatgtcttgctttgcatgtgagcagaggggccaagcaattcccagacactctcagtagtgggtagtccttaactccttcatctcagagacacatgccaagatcacccagggctggacacctgctctggaccctggccatggtcatggcttgtcattgtctccttgctgcagacaggatatgagatagagggcaatcaggagaaactgagggccctggtctgtgagtggggcagaggctgtggctgtccggagaggaagggtagggaagggaaaggcgcttcttttggaagaaggcaggtctggttctgagtactggctttgccattaaggctttatggtgctgggaagttactttaccgtttcaaattggttttctcatcttcaacttgccttttcacttaatttatcataaatatctacctatgttaccaaatatagatctactagtttctgtaaaatagttgcatgatgtttaaaaaatgtattatgttattaactaaaccatttccctacagttggtgttctggattgaatgtttttatccccctcaaattcccacgttgaagctccaattcctaggatgtctgtatttggagagggggcctctaagaaagtaattaaggttaaaagaggtccaaagagtggagccctgagctgataggataagtgtcctataagaagagacacgagagagggctggctctctgtctctccaagtgcttgcatcgaggaaagaccatgtaaggacgtagcaaaaagctggctggctgcaagccaggaagagggccctcctagaacctcaccttactggcaccctgatctcagacttctagtccccagcactgtgagaaaataaatttctgttgtttaagccaccagtctgtggtactttcattatggctgcccgagcagactaacacagatggacattcaaagtgttataattttcccttattacagattattaagatgaacatttttgcctaatatgttcacttgctgggtcataggatgtttcttttttcccttttctcttgttataatttttatgtataccaaaatgttgagaggatactataaactgctatacacccatctacctacatttaacaattgttatcatttaagggcacaaccaaaaaattgacccccaaaaaaggctgttatcaatttataaccctctcccccacctcacacacacacatacacaaataatgtaacagagaagatgcttttatctttgacacagaaagaagtccccaggacctcagtttaaaggggaaagaaaaggtctcttcccaggagggctatctttggtcagactcatctttctctcctctgcctctttgtctctgtctgtcctgtgtccctccccaccaattccccaatccttaaatgcatgagtccaacctttatgccactctgctctctgccctatccaggcacatgtctaataggccctttgtttggcctcggagaacttggccagccccttgaatatgaaaggaaagaattgtgaggaggctttccaagctgccattcttctctggttacagcaaaaatcctatgggcagaatcttctattttatattctgagaggctctgtcgtcagctggtgaacaagcctctctggagacaagggaggcaagatgcatgcacgggttaccatggggacagacaagctgcaataaatgttcctgctcatagcttgacgaggttttcacagtttggtgtaatttctttgtcagtcgtccattaagtcactcctaatgaatcactgggagtgtctgctcttcacgtgaaccttgggatcgcatgactcaggcagagagcagtcttaaaagcaacagcgagacaacaaggcatctttaactggtggactttttgcaaatcgagtggcctctggcctgaggaagattctggaactcaccagagtgggccaggagttcaagctgctgttttagattaatcttttgcttactggtctcaacaggtatcttgtgcctcccggaatcctgtgtggcttggtgttcctggggagagggaggaaggaggttcctggcaggagaaaaggggttctaagagttgaccactgggcctttcagccctgatgtcctctgtcatttggcggacgagaatatatgtagtgtgtctgttcttactaagtgccactttctacataaaatgcatatttagggttccctcttcctgcccctctcccccgactttagtctggtcacaggttcttgcatgctgggttgaaggcactgtggaactcaaaggccctggctccccagcatggtccctgtggctccaaggcccttcaggaccaggctcagcctcttctccagcctttttactcaccggcttgctccaactgctgccagcctcatgaaacacttgaattccttaagcctgccacaaactttcttacccctggaaagacaacttcctgttatctggagtgttcttcctcatcctattatctggtttaaacctacttttccatagatgtcagtctgtccaggaagtctcacctgaccccctgaaaggctgaattaggtaccttacctgtctcacctgtctcctatgttcaacggtgaacccctggagagctggaagaacatctttttgctcacctctttgtattcacctttagcctgcagaaagattcttcacgctgaatgatactctgtaaatattaattgaataaacacaaatgtgtgtgatttcccccaggtgaggaaccctttgggccaccccacaaaatggaaccttcttctcatctgagcatctctgaggtggtatcaagctctgctgtgctaggtgtcatgaccctttgccaattagcctataggatgtgctcaagaagagtgcaaaggcttgattcaggattttaaaatcaatgtagctaattaaaaaataactcgttgaactgaaaaacaagttcagaaacaattaagataattaaaatatcaccaccttaattgagaccaagtagtgagcttaaaaataaaattaatcaaaaaaagttacatggaaccagtaattaactggcttttgaattcaatgctttacagcttaacaaatctctttaaattaattcattcttggtttgttccttgagaaaggtttctgtaaaaagtcattttgaaaaaaataattggatttgtgctgggtgccagttgactcttgaatagttctgcatataggtgggaaagataaaattaacctttggtgggcgcctgctctgtgctagggatgctgtcctgtttgggtccacaggagtcctgcaggtttggtgatagaagaggtagagaagacacagggctttgtcatcctctggggatgtctgcatcctctcactccttgtatgcggagagagattgaaacttggagcaagtccccaggaaatcaatagcaccatgacaaggaaactttgaactctgctcagggctgtcacgctcagctgcctctcctaccttctcacctacagtttcccctacttattaaaaggcctctcaaatgccacttattattcggatctcttatccttcccttttcaaagtgcagccacagtcctttccagtactggtgctgggtgcctttcaggagcatccatcaccctgagccttgaggctgctaggtaaaacgtatttgggaggcctgagtttaaatggaaatgacacactcctcatcccctttcaatcccagtgttgctgtttctcaaaaacaaaatgcggcgaggtgattaaacaaatgctgacagcttgatttgttactgttttgttgctctgtgaagttcatttactctaaataatttgcatacatgtttgaagtattcagaccccagtaattgatttttagcagacttgatttctgtatgcaaattgttaagtatgtagggagtttaataacgaacagtttttatttattagtattttgggttggaggttttttgtttttaaagaaatgttagcttccagaagtggagggtggtctacaggagttagcctaaggtagggtgacagatggcaaaactacaggaacaaaattgaccagaccatggttcctttgactcagttgggggatggctgcattcagagggggtaggctgagggctcaggtgtccagagctgggcaccccagcctctggggaaagatcagggctggtgacctcatcctgtggggtgtactgagagggaatcgtggaccatcctctgcagcactgggtaatctggctgccccctccttttacccagtaagtctcattctgcccccaaagcctcttaagaatatggtgcacttgggcccttggcatgaggtgagccccgcaatcagctttttaaagaagatagtaggagattctcatgcttcaagcatacactggtgaagagtttgggttctggagtcacagaccaggtttgtcctgcatctctcattagcaatttatttttaagacttgcacattaatagcagctacctcctttggtggctatgaaaattaaatgtggtaatccaatcagagttcactgcctgtatgtcaaaagcactcagtgagtgttaactatggttctttgttattatgaaaactgattatttactctgggaaaaaagacaaacacaaaaaacttaataaacacatatgaggtgcttagcatgttccaggtctaagtacttacagatattaactcattaaatgttcatgacaaccaccaagcaatagcaggtgctgttattatccccatttttacaggagaggaaagtgaggtatagcaaggttagcaagcagcagaggcagggttcagtcccagaagctactctgccttggagtccgtgctgttccagaagctactctgccttggagtctgtgctgttcccggatctgctcagctgattcatgatccttgtgattgcactgtccgttgagaccacccggaggacagtgtggcatgttaacaaagttggatacagaggcaaaaataagctcaaattctgccacaaagcttgtcatgtagtactgcagattttgacacccatcaccctaggccaacctgtttttctctgtctctgacatccactcaagtgaaaatctcaagttctctgctgcagcacttggcatctgttggggaaaatgcctcagctgataactatgactggggctgcctgtggtctagtccccaggtttcttgagatctataaatgtcttcatcctgtggtgtgtggaagtgtgagaaggggcaatgaaggactgacatgtcctgctaagctgttcaagcagcagaaacgccattggatgttgtgtgttcagaacccttgagaaactttcatcattagtggtcatctggtaatcattcttaattgttgactcaattttgaatgattcttggagagtgagtcaaagttggctgagctgcagccccagggttggcgtgggcggcagtgcactgggctgagactgcaccagtctcctggcttcttatgcagacatccccaggaaccaaaagagttccacttaggaccaggaagctcttgctgcaagtttctggaagccccagccttggaagactctgaaggcagacacagggccctgccacctgccttgcagaggttgccttcagcttaagagctctgagtgaatgaacactctgtccctggggctcaaatcagcctctcttttatctcacagcctgtttctttctgctaagctccaagtatcagagtcacatcccttggggagtagactctaccaggtgactcccctaggaccgggccctgggtcttattactttccagatgggcctgagaatgcagcctggcttctgtttacagctgctgaagctgcggcagtggagggagccagttaagctgttcaagtagcagaaatgcttttggatgttgtgtgttcaggacccttgagaaattcgcagcaggcatttgaagaaagtagtgtgcagattctgggcctgggcaggaggagaggaacagtgatgtcctctacatgctgaggagtcaggatggctaagagtccagtggttgagggcactgtgacatttctttgtgtttgttttggtttggttttttgaccatgtcatttcttgtagaagttttgctatacctgctcaggatgccaatttgtttaaccaaatgtttgcatggggaggacatggggagacatcacctcccctgactgtggagagcagttatgaaagatttactgcttaataggctttaggccccagagcttgaagatggcacaattgcttttgttttgcagagaattccccgaggcctcttctgtgccaatgatgagcatgtgcacctcagcacgcagagcgctgattagctgaggacctgctgctcagcctattccaggaaatgttgcaatatatgaactgctgtctttggagaccctttctggagttactttgttggaatcaactcccctcaccccctcttgtctcattactgcctccctacaaaccacacttaatagtcagattgagtatcttatgattgcctgaacatgcctccctacactctctgtgccggttcactctgactggattgcattttctatctttgcttttcaaaatcctgcccatccttcaagatccaattcacatattaatgcttcaccaatccttgccctagaaattgatctccatttttctcttgggctctgttatcattttatatgcccgtcatggtccttatctaattctgccttgcacaataaatatttatgtgtaagcttttccccctccctgttacgttgtaactttgtgcggcacaaaactgtcttacatatcctgaagttcttcaaaaacttaaaataggttgtttatgcacatagtgtttattgaatggaagcaaaaaactctgtcctcaaggacttttcataggaaataagtaaacttaggcatgaatgaagtcataaaaagcaacaccagattcataaccaaagagggaaaagtagctcttgtttcttggatcatgtgagattctaaaggattttttaaaagtaattcctgcctgagctgaagatgctgaaactcccaaagcacaaaggaattgctcccctgatgttgaggaagaatgtgtgatagacacagaatttcccctggcttgggctttcattctgttcccctccagcctcagagaacagcaccgagggcaaacacatggttggtttacttcctatctgtttatttaagtagaaatagaaattaaggcccggtgcagtggctcaggcctgtaatcccagcactttgggaggtcgaggcaggtggatcatctgaagtcgggagtttgagaccagcctggccaacatggtgaaaccccatctctattaaaaatacaaaaattagccgggtatggtggcgtgcacctttagtcccagctactttgggaggctgaggcaggaaaatcacttgaacccaggatggggaggttgcagtgagctgagatcgcgccaccgcacaccagtctgggcaacacagcgagagtccgtctcaacaaaaaaaaaaaaaaaaaaaaaaaaaattaaatttccctggaggtcctaaaccctgccctccttcttgtttttgcctcagccctggacccatccaaggacccctgcctgaaggtaaaatgcagccctcacaaagtgtgtgtgacccaggactaccagaccgccctgtgtgtcagccgcaagcacctgctccccaggtaaggcaggaaggccgggggctgggggctgggaggcattctgcagctggcagatctgagggtttccagtctttgacgtggggatatggggaggggagagcatagtgttagggtcgccatttgtatggtgtttggtgcctgtactctgactatgataggaatctcagttctcaaacacaggtttacaaagaatgtccatctttatttcctttaaatctacttcattttgactctgagtcctgatctgaacagatgagcagaaaattccttcttggtcatgattgagaattttctcctcccagagtgatgccacgacccaggaaacttacaactaagaaagcaggggccaagtgtttagtctcctggttgcactaacaacctcactgtgatgattcttcgaggtccattgaggcccaagggctctctgcttccatgtccccattggatgtagcatctttgccatccttggtttttgggtcctgccttctcaggaccaccacaccaccattccttctgggaacatgctatttcctcagggtacagcccctgatatcctcttttccccagcccagggggaagtatcccccatcttcttcagggtccttaaagccattgcttttacccctaattccactcccagcatcatctatccagtggatttaggctttcacaaatgatggatacaggctttcaattcagactgcttctgcctttggtcctgcaaaaatacctgaagcatgaaagcaaacaaacatacacatgcaaacgggctttctttaagaagggagtcagatggggcagggatgagaggaaggcaatttcagtgcatattctgcacttctccctgtgctgcctgtacaattgagaggtgtcgcagtggggctttggagttgcccatgtccagttcccaagtgggtagtatgctttgctgctcaccggcactgtaccatgacctcagacaaataaagcaacctttctgaatttagataaataaagattcccacttaaatcggctccccaccgagaacttttgctttatatctccagcttgagctgggaccatgcagaatgggtcctatcccttccctctgttcctgaagtccaagcaatgctggtccccttggctgttcctctgggggtatgttttaatttccctcaatcctgtaaatggtttcctctgaatgtgcctagggagctcctgccctctgaaatcatggtctggcagagaaatggtgctcctggcatgaggtgagcatctagagcagcccccaccccatacccctctggcctctctaagcctggcacctgcaacaatagacctagcatccagggtcatcttgctctgaggtcactgtcaaggttgtttttaaaataatcagactttgtctctacaagagcaagatgcaaggtatcataatgtgcttttctctgtccccagactgaactgttttcctggtagtaaagctagattgcatccctggaatacttcagcctgtgcaagcattgtgctcagcacctgtttccttgagttctttcagccattttgtaaatttggtatttattttgtctctgctttacaaatgagaggactgaagctagtgaggcattagtaatttgtttgcaagcagcagcatgattcaaacccaggattgtctgcctccaaagcttatggttttcactactacaatatgttgatgtcttcattctacctgtcattgtctgctcatccattcattgacattcaacgaaaaggtattgaggccttaggcactaaggctacagaggtaaacaagagaccctattcctaccctcaaggaaagtcaagttcattggggagtggtatgtaaaaaaataccacttttttttggggggggggggttattatttgaagttccttttaaggtatatattatctgagaaaactagcctagaatctcctgctacatgcaatgtctttcttctcggatggagggaagatgtggccatatgaattaaaaatacccaaataccctttgggatggtgctctaggttgtttagccatgtgtgtgtggtgtgtgtgtgtgtgtgtgtgtgtatgtttgtgtgtgtaagatggagagtccattgcatgtttcctcctacaatgcaggatatagccctttctggaagtgttagacaagacatttttggttttaaactcaaatcggtttgagacctattcagcagcctcattgatattcaggcatatccaggtgtaaatggtgtttttctgggcatgccgtgtttctgtgttggaagcaccaacacttttgcttgtgttgaaaattgtaatcctcatctcccacatctcctggtgaccataaaattacagtgggtgagagcatggatttgggaaggagacccatctgggctcaattcccaggttggctatttccttttccaagtggccttggcaagttattttatctttctgaatttgtgcttccttatctgttaaataggtttaatgacagtgcttctaccattcctctttttcatttgctggaacacatcctctagtaattcttacagggagggtttatggatgataaattttatgaatccttgcagagtattttgtgtgtgtgtgtgtgtttgagtgttcaataaaatgatggtgtgtaaagtacatagtctattgtcaaataatagcagctgttcgtacaattactgagacaattatgataatagttattattatctacttcatttcggaaggtcagccagaaatctccaaagttgcaagttactgactaaaaagtaattcactacaggtgccttggtccctacccagtttgattgcacctgcgtctgcagtttctgcaagaggaagcctttgaggtttagcgtgaggatgacagtgtcatttctgctgccccctttgcaattcacagcaggtgtagactaagaagatgatgggatttctgataattgggcccactggttcaatggaaaaagcccaaggaggaggcactggctgagatggtgtgcccactcctttatcaagatctgggaggtggcctggtccaggaagtccctgagtgtgtttgttgtggttgttatgtccagccttccttgtcttcctcttagaggctgaattactcagtccacgatatcagttgagtgcatacctctttgaagggtcttggacaccttcccagaagaaacatctgtccttccacattatactccaggagtcccctctgaccagggagaccatgttgacaactctatttattcatcaatcagggaagtaatctttctctctgtgaaacatctgtaggcactcttgccagccaagttggcctctgcagcagcttaagaggcaaatctcacctgccagacagtcatgagtgcacacagagagttagccaggccaggctttagctgattatgaggctccagacttaggctatctttgcaagcagatcaagacagaaggacagtgagcacgtcagtgagagaatttcattagctttctttgtctgtggagattgagtgagcagagaagctgtttgacacacacatctgtgactgcagtgtgtcagggccggcaggcaagcaatttcagtggggggccaagcaaggcagccagccctcccctgctggaattcttctccttgattagggtggcatttgtatttggtttcaggtaaactcatattctctttggagaattctctttggaaattctttgtttcacaccttcctgctgttaaacaatgtagagtggggttgcaagggacagatttttgtagtatgttcatctttcaagttctctaaaagggccagttatgcacaaaagagcagtgtgaagacagctgggagtcaggaagccttctcttaagctactttaaaataatttttaatttagtttggtgtaatgatagttgatgcttgttatagaaaacattaaaagtagagaaaaaaagaaacaagaaataggcaatggtcacactctctaaaaacagtaattaaaatattgtggaatattttcttccattcttttttcaaatcatgggttttgtctattggtgtgtttttgtcaaaactgatcaagtggttcctatattgcatataaaaatttctattacatcctctttagttaatttttataagtgagtattttaatgatactacaaattatttatagatataatttttttttgagacagtctccatcatctgggtgaagggcagtggagcgatcatagctcactgtaaccttgaactcctgggctcaagcaatatagttatacattttaatcattatataacatactatacaaaaaataacttgaaatgagtcgtagacctaaatataagagcttaggcttttttagaagtcttggaagaaggcttcgaagaaaacataggagttatgaccttgagtttgactaagatttcttaagtaggacacaaaaagcctgaactgtaatgcaaaaagaaaagcaacaaattagacttcatcactggtcttctaaaggcacttttacaaaaatgaaaaagacaagtcactctgagtgaaaatatttgcaaaacatgtacaacaaaagatttgattgtaaaatataatgaaagcatatgtgcatttaaagactccctcctgcatgttcatatcagctttatgtgtgatggataaaaactgtgaaacaacccaaatgtcaacaagagatgaatgagtagacagattgtggtctatctcataatggattactattcagcaataaaaagaaataggctattgatacatccaacataatggatgaatctgataataattaggcagggtgaaagaagacaaacctcccacaaaaagggggagatactatacaatttccatttacttgaaattgtagagaatacagaccaatctgtgatgacagaaagcaggttatttgtcctcagagtagtgatcattgagtgcctaagcattctgtaagcctcgatcataaagtagaccctttgggagacagttaagtcacactctggtcttagatgcccaggatcccattggtaaatgggtttgtttgcggaagaagggtttttattacaaccttgtgctattcttcctgacttaggttttagcaacattctcataggcattcttaagaaaaatgttctcttaggggacagggggacaaacagaaagtctttaagcatgcagagggctctgccctcagggattttctgctagtctgcatggctggttctgatttattgttctgtggggtgggagatcgtggggcagagggtggaggtttccctacagagtgctgaacattgattttacctctctgttgccattgattttcatttggagaatggaaaattgaagcatttgttttaagccttccagacaagccacattctcaaattctgcaagtgtattgtgaatgggagggagggatgtcaggatggaacttacaatatctaagtgtacccttcgaagcctctggggagcagtgggaactaatctgtttttaaataaggagcagacatggcccgacttcccaatgggctgggcctctctaatgtaatggccctttatctccacttcttaactatctggaataacaactaattctccacaccagcaaagaattcagatccagtcgaggctctcgatacagtagaccgatctgagagttttcagtcttttatgtgaacttgagaaaaagaatcaaagtgttcgaggtcagagagaagtacatcacagaatgtgcctcaaataccaaactctcagaggagatttgaaaggatgacggttatttcatctcagttttgttttacaacaaagcactgcctcctgctacaggggctttgaactggttgattacacatacacatagctgtcgaggtttggaagacacgtggccatgcaggaggtgggtaattcctgggtgtctggttggctttctggcacttcacaagtcaaggcattgccagtgaccaaagagtgattgtgcccacattcattactatgattttatatttatgtagcttatgccccttctccaagtggctcatgcattgctttggggttctccattaagctcagaggatcttcatttactgtgttctgggtctggatagggtgccagtgagagcttggtgctatattcctacactgattgtggaattaatgcatggagttttgggtttccctcttcagagtagtcatctttgtaaacagaaacatcatcactgtggtctactgttctgcaaataaataccactggacagtaaagaagatgagaaggaaagtggctggctcaaggttgctgcttactgaccacctatcttgtgttaggcacactttgcaggagaaatcttactgacttctcacaacagtctgctaggtcagtattataatacccattttacagatgggattgttgaggttgtgtaaataactgtcctaattggacactgccagtaaggggaagattagaaccacagtggaggtcactgcacttccagagtccatgcctgttgcctatgctgcacagcctcctctgctgtggagtcatggggcaagctcccaggggcctgatgtacatttcccttagtgataactgccaccccccgctaccccccccacccccagcccatctgctcctggccctagaggtgctgctgtacagatgcctgggaccttttctcctaatccttgcccctcgcaaagcaactagtccatgccctggtattaaacctatttcttctttctgtgcccaaagcaataattctgagttcatttttccccttcttggcttttctgaaagtaatcattcaaaccacatgtcacttaaacatagagatatttaattactttaaacccacaatcgcctctctcttttttttaaacagcagaatcactttatggctgtgctcaggttaaggacctagctgtttgtggagccttcactgaacaaggttttataactctcaagccacttaactcctctgttcctttgtttttctctctgaaacgaagactattgattagatgaccttgatgacaagcagcagagagtaaaaagcaattcataatggagatgtgaataattatgtggaatttttagtcccttggattaaggaacagaatgagaggcagatattgcacattgtcaggcaaattcgctaggctgggggtccccctttacaaatacaatttttttttttttttttgagatggagtctcactctgtcacccaggctggagtgcagtggtgcaatcttggctcactgcaacctccgcctcctgggtttgagcaatttttctgcctcagcctcccgagtagctgggactacaggtgcatgccaccatgcctagctaatttttttgtatttttagtagaggtggggtttcgctgtgttagccaggatggtctgtatcacctgaccttgtgatctgcctgcctcagcctcctaaagtgctgggattacaagtgtgagccaccacacctggcctacgaatacatttttaaaaataacaaaagaagactgccagtaaaatgtgtcacactcatcttgttctgccttgttttcccatttttcatttaagccttgctttcagtaccatctgaagatgggggtgagtggggcaggtttacctggcaaggtcaaccagtgagactcctacctcctgcctggcctggtagtttctagatgtgccctcaagaaccagagcctctgccctgggagcttggcatctcccctccaggctgcacttgctgaagaaaaacaacaacaacaacaaaaaacaacaaaaaaagcgcttccagagggggcagttcatattttccattgaccccaaagcactggatcaccatcttttttttgagccatgttttatctgtaggagatggagaatgttttatggttgaattcccaggatgtgcacatgctcagatgctaataagtcaagcgtctgcgaagctgggaatggtagggccagggattgattagcaatgccctccgatttcctgcttccatttccagtaaaatggcattaagtgtactgcccttctctgcagttctgcccagaataatggggctgcagttgctgtatttattggtatccttgcttattaaggaatgtacatattggtatatttcctacatcggatttcagtggattagaaagaggaggttgaggtaggtgtgcctattttgaatagataattactaggtgtgatttccattagggatcagatcttgctgggcagcactcaggtgtgaattgctagagcacatctctccctaaacattgagaaaatgacaaacctgagcccccctgcaattcactgaagatgttaaattgcccatcttgagtacaaaattcctagcaagttctggagattttttttttttttttttttttgagacagagtcttgttctgttgcccaggctggagtgcagtggcactatatctgctcactgcgagctccacctccctggttcacgccattttcctgcctcagcctcctgagtagctgggactacaggcacttgccaccatgcccagctaattttttatatatatatatatatatatatatatatatttttttttttttttttttgagacggagtctcgctctgtcgcccaggctggagtgcagtggcgcgatctcggctcactgcaagctccgcctcccgggttcacgccattctcctgcctcagcctcccgagtagctgggactacaggcgcccgcccctacacccggctaattttttgtatttttagtagagacggggtttcaccctgttagccaggatggtctcgatctcttgacctcgtgatccgcccatcttggcctcccaaagtactgggattacaggcgtgagctaccacacccgggggggagatattttttagtattcaggtagaccagagcctgtgtggcctcctcacaaagatgtcgtcatcttttttttatttttttgagatggagtctcactctgttgcccaggctggagtgcagtggcatgatctctgctcactgcaacttccacctcccgggttcaagcgattctcctgcctcagcctcctgagtagctggaactacaggcatgtgccaccatgcctggctaatttttgtattcttagcagaagcaaggtttcaccatgttagccaggatggtctcaatctcctgaccttgtgatctgcccatctcagcctcccacagtgctgggattacaggcgtgagccgccacgcctggccgatataatcttcttttataaaagttatgagattgaactttcccacttttacttcattttaatttttctttaatcactttccttttcctttgttatttaataaatctactgtcacttacttgctgttctgccaaaactcatcaagatccgaacccagaggttttcagtttagacactttatatcagattaatccaaccaatgaaccgtgaaagacattctttatggatataagccaccatagtagggcccatcgggggcgctggccttgtggattctgggccagaaaatggacttaggatgatttagatggacgttcaaggctatctttagaaggacttttgctttaaatagagtgttctcaagctgatgttctatgtttaatgttcctcatggagagagggtgcagagggccaggagagatgaaagttaattagtttggggaccttggcacctttccaaggcattctcttaaatgaggtttttcatgggcatacattgaacccaatgttgctgtgctgcaagtaatgagaagttctcctctcagcctggcttgtccatgatgcgtccacagctggaggtgctgtggtgtcatgcttcccagtgaactgcaagtctagcttcggaacagtgacattgacctgaaggaaaggaggagacccagctcaaactttccatcactgtgaggaattcccaagtagacagcaaagtgacaaggggccctgtggcctggagctagataccttctcttggcaggcaccagggaggccatctctgaatatggtgacagtgatgaaatgctttagagcttgagtccttcctgtagttgcttcagcaggactagctcagaaaactgctcatgtgcatgctttggtgattgtgggttatggatcattaattcagatcccactaagttggagtttgtgataatttctttattcaacaaatacttatgggtgccttccatttgccagacactgtgttatatgtttggagttttatgatgagtgggcatagtctacccttgtggagattaaagtctattgaaagagacagatgaaaaaaaataagtatctaataaactgtggtaagattaagaaggataagagtggagtggtttaagaatcactttagattggttgaacagtgaaggcctttgcagggggcaaaggtaaaaccacctttgtaaaggttatgacagcgagggaagtctagcatgggtgactccatcttgcctctagcttcacaggctggctgtcttcactcattcctggacccaggtcaaaccaactacgggaagaacttagtttatagttaaactttgaaagaaggatgaggggggaagaaaggaggggaagttccctctttaaaatgatccctttccttgctcagggaccaaaaccacctttgtgagtctaatgaaaagccacaagattaggattatgggaggggtctgaattcggctaaaatgtaggtgtagctaaacaataaccagccattgtctaccagcttgcctttctctgattccttgctgctcaggagtcatgtgaccagaggtaacaagatttgtgactttccctattctatctattgctcctatagataacatcactattgtagaacctaagattgatcttttgagatatcttcagacctgcacatcaagcccctgactgactccacttggacctgggactcacaactcaaccagtcctgtggcccctacccagaggaggactgagtacatgaggaccctttttcacagccctatgattttatcccccaccaatcagtggcacccattccttaggcccctgaccacccaattatccataaaatccctagcctctgaattctcagggaggctgatttgagcaagaaaactcctgtctgaccacttggctagctccgcattaaactctttttctactataatatcacagtcttggtgaattggttttctctgtgtagcgggcaagaagaacctatcaggcaattacaaaggtgtaggtaccagcaaggcagagaggagaggaagtgttctcagtggagggaacagcctctgcaaaggccctatgtcggggaagaagagaaggagctcggtgtccaaaagaaaatgagaaaggggaggcctgtgcttcaggaaagaaggagtatggatacatgaggctggaaagaaaggcagggctagattctgcaacaccctgaagaccatgaggacatgcgcagctctcagaccaggtatgatgggatgttttgtgtggctttcagttggagagtgatagaattgtgtggtttagggtggactgtatttccttaaattcttgttctttaaagcagacttttgtaccacttgagagaatctagagggttctgtgtgcattagaaatcctaacgatatcctcattgagcttgtagactagtagaggaggttaagaatgtgaatgtgtataatctaatctagaagatagaaaatcccatgaaataaagtggaagctctaagaaggaagaaagcacttccagctacagttggggttgggggagggttgaactcagataaggagcattacttagtagtgtttattagtatttactagtgtttaagagcatatgaggacactggctcagacccattgggacatgcttaatgttgacacctgttaaatggcacagctgggggaccagggcagtgctgccccaaacccatcttctgtgtaagagccactctgccctcaagctgcttcctgcaccgaatctccatttccttctaaaatgattactttaaaccccacattatggtatttttataaggaaagcagtgagcttagtaccagtacatagtaggcactcaataaatttagtctttcatctgagcctctagttcctcagggaacaatcagatgggggaacaatccttgctaatctcacagaggttttcaggatcatatgtgcaaagcgtcctgctatttttaatgttctgggtttaatgtcagttgttatcttagtccatttgggttgctataagacgatactatagactgggcagcttataaacaaatttatttcttacagttctggaggctcgaaaatccaaggtcagggtactggcagattctgtgtctggtgaggacctacttcctgtttcatagacagctgtctttttgctgtgttttcacatggcagaagcagccaggaatatctacgggccttcttttatgaggtcaccaattccattcatgaggtctccactttcatgacctaattactgtccaaaggcttcacctccaaataccctcacattggggattaggtttcaacatagtaattttggggagacacaaacattgtccatagcattcttcctctgacgcccattaaattcatgtccttttcatatgcaaaatacactcattctatctcaatagccataaacgtcttaattcattccaacatcaactttaaagtcttaagtccaaactctcatctaaatatcatctaaatccagtaggaatgagattcaagatactgttcatcctgaggcaaattgctctccagctgtgaacctgtgaaaccaacatgttatgtggttccaaaatataattgtgggataggtataggattcccatcccaaaagagagaaataggaaagaagaaagggataacaggccccaagtaagtcaaaacttcaaaacggcaaatagtagtaaactttaacattcaagaataatcttttgtgactttatattctgcccttcaggcccactgggcagagctactcccttccagacccactggggtaggggtactgcctgccagacccactggagtgagagtctcaccttctggacccattgagatggctgtgttgcccccacggctttgcctagcagggtttgggcccctgatggctccaggcagccctgtccccctacagtgtctctggttcttgcaaccatagctctcttgggctggaatcatacactggtagctctgctggtatggagctgctggagtaggtgggcattgccctaatgtggtctttctgtggtggcctcatagtactcactgtggctcttgtactctgggcctgtgatgggtagagcagccctgatgatttctgaattgctctttccttgtctttgatgatagctcttggcttttgtttaggtcactgactaatctcaccattgtcttgaatagcacctggcttctgttgcgatggctgacccatactaatctcctttatacattgtcactttaccacacccttggcattctctctagatcatgttttctcattctttacaatatgaataggctgagaactttctaaatccttaagttctgcctccctgttgatgaacaatctcatctttgagtcattttactgtaagcaatcaggaggagccaggccacttcttgaacactgtgctttgatatttcctcagccaaatatccagtttagttgtttgcaagttctaccttccacagacactaggacatgaacacaattcagccaagtttctttcttacaactttctaacaaaagtggcctttcctctagtttctttattttttgagatggagtttcgttcttgttgcccagactggtgtgatctcagctcactgcagcctccgcctcctgggttcaagtgattcccctgcctcagcctcccgagtagcttggattacaggcatgcaccaccatgcctggctaattttgtatttttagtagagatggagtttctccatgttgtacaggctggtctcgaactcctgacctcaggtgatccacccgctttggcctcccaaagtgctgggattataggtgtgagcaactgtgcctgatctcctgtagtttctaataatatattcctcatttatgtctgagtcctcatcagaatggcctttgctatcttaatatgtttgtgttgctatgaaggaacacctgaggctgggtaatttataaagaaaagatatatatttggctcatggttctgcaggctgtacaagaagcatggtgcagcatctgcttctgatgaggacttcaggaagcatccactcatggtggaaggcaaagaggagcagcatcacatggcaagggtgaaagcaagagagaaagaggagggaggtcccaggctctttttaacaattatttctcatggacatgaaaagagcaagaactcaacactcaattattacagtgagaatggcacccagccagccattcatgagggatttgctccatgacccaaacagcttacattaggctccacctgcaacactggggatcaaacttgagatttggaggggacagatattccaactatattactatccaatttctaccaatattgtgttcaggattacttaggtattctctaaggcgatcaaagctttctctatagctctctccttttctttctgggtgctcaccagaatagccataaagatcctttcatgacaatctaggctcttgccagcatgcacattcagactcgtccagcctctgtccattgccctgtttcaaagctgcttttacatttttaggtacttgtcactgcagcaccccacttctcagtaccaattttccatcttatcgtgtttggggctgctatgcaaaaataccataaactgcctgataaacaacagaaatgtatttctcatagttctgaaggctaggaagttccaggtcaaggcactggcagactctgtctggtgagagtcccttttcactaggacattttttcattgtgtcctcacattgtgggaacagctagccagctctctgtggtctcttttataagggcactaatccctttgagaggtgagttaatgacctaattacccctgccaaaggccccacctcctaataccatcatcttagaggttaagattttgatatatggatttttggggagacacagacatttgatctacagcagttgttgctttctctactggctgaatgaacactccactgcttgttttgctcttaccactcacttgcaatgcccagattccctctggagtgtcagccataggcgggcatgactagttcactcttgtatcccttgtgcctagctcaggccttggcacactgcaggtgttcatggcacgtttaatggatgaatgaatcagttaaatcaagaaaggagctgggggtacagggccaagctggtgcacttaatggaagctgtgttaggtcagccgagttgcaaagtgatgcttacagtaagagttagtgctattaataccatgagggaagtgagtatattccatttccttttgtttgctgcatagaacctaccacattcctggatacacagaaaatactcagaatgtgtctatgaaactccccagggaaactggaggtaatgtgtcaatctgctgtgaaagtggccctgttcttgagaaagagcaacataactagactctgcaccctgcccgacctggtagcctgcttatttagggccttctctctttgtcttcctctctttgtgcaaagtgactacacacatctaaagtcagctctcctctgcagctgcaggcttggccttggtggtgagaggatgtcatccatcccagtggccccaggagtctctcagacctgcagttctgtgttcttcagagtgctgcagaatggccttggatctgccttaaggaagtaaaaaaggagagagacaggtattgagtgtgcacactgctgactgtctcgatgagggcctgcatggctcttcactggtcctgagccctgaggctcttccatgcctggcctaggtttatccttaaggactgcctcagccatgaggcttgtaggctccagaatctcttctctctaaggtctgattcctctccccttggtccacaggattcacccatgttgcccttcagaataggaggcaacagggctgcctgaggcctgtgttgcgcactcagccagaaataagcctggggaggcagcaggcagcatcctcaggggttcgctttatgtcctggggagaagcacagagaagaggggctgggtggtgagctgctcaaccctgagaggggctcaggcctgcagctgctgctctctgccatgtgggagcccaggatacacctgcaaactaattgaaatatgctgcaaactaattgaaatatgtgatttcctgccagtctacctggtctccaacttgagcagtttctccttgcaccattttcttcgtcttgtggtacgtggaaagttggcttgttgttctttatggctctgtgattacctacagttcttcggtggtggttccaaatcctttgcatcagagcggttctcagagcaatacctggtagaaataggcagagcagaggcttggggtgatgaagttgtgctccttcagggtgctggcattgggggtacaaattggtgcaacatttctggtgggtattttgacccccttgattctttgattccatttttgtggatctatctcatggaagtaaatagacattcacatacaggtttatatacagggatgttcagtgtgattcaggatgttcagtgatgacaaggttaaataaatggaaacatccccttcctctaggtgatttctgcttgaactcttgcagtattgcgagcctgcctaccaactttctgaggtagctttcctgtgtggacagctcttatgtcatgtttgggttatcttccttaggttgagtcaaaaggctttttcttgataacttcaacacggtctaggtagaataggttctgtctggttctgctgtggaatagcattgggacacattggcttactactccctgtgctgacacaattttgagcatcttgtctgtacaagaggggcagttgagtaccaactgtattgcccaaagtggccagtgataaacagctatgtttgagtggctgggaacacggggcaaatgtgtgtggaggtggaggctatctgagaccttctcagagagggctgctacttgagctcacctttgggaacggatggggcataccagcagaagacaagtgctggagaaaacacaaggcctggggagctagccagagttcttgactaccaatccagaaaatgtcctaccagtcagggccacataggagagaaggagcttctctggggctccgtctcctctcctccaacactgactgtgaagaaacttcttgagcaggggataagtaatggtgcggatctggctgtaccagcctcctgtagcgcttttgtgaatgacccaccactaatgtcttatggggaatggtgttcagcctaagctcctcacatgccatgtctcaatcaggatctagcctgtctctgtgtctgtcctggcatcatgtccctgaagccacttctgcttcattttactgacttgctccttcttaatggcaatcacacccagccctcccagaacagggggctttgctgctggtgaccagaaaacaattacaggtgttttctttcccatgggcacatcccatgataattaattgccctcaaggaatgtaagcaagtgttttccaagattagaacagcgaagctgatggtggaatgacatgtgcttgtgccaacctttgtatgcacacctgagcctacaattagctggaatctgtgctttcccagctgctctggcccctcctgtgaagaaggaggattatgaatgctcaggcaggagataccaaatgaagttctcagccgtgggtttgcttgatgagtatttgcttttttccaattggtgtgtccattgctaaagatttcctctaaggtctcagggatagagatggacctctctttaatgggccaatgaaaaaagtaaagtagcaaaacaataaatcaaaccaaaatgccaaaggtcagtggacaaaaggaacaatttcttttctgacccttgttagtaagaaatggatttttaaaacagagcgcatcactaactattatcctaagggaataaaaaaagctcaactgttcgtttacatttccctaatagcttgcaattacactgctgcttggcacttttccttggcaaagcagaattttagtcagagcctgagagtgcctctgtgtgtgtgtgtgtgtgtgtgtgcgtgtgtgtgtgtgtgtataactgcttttgcatgcaggcctcaggggccttgcttgttcaacaactgaactttgaggtaaaaccccactggtgtctgcctcacagatacccttagtgttactgggtgtgctctgtcactctcttaatggaaagtgcagactgcagtctcataccagttagtagactttacgtggtcacgtcatcctattagtcttcatgatctggtcaggaaacatggaggatattgtgagtttaatgctggaagtaggtttgactagtatccttggacatcatatatatatatataatcatatataatactgttatataataacagtattatttatgacatataataacatatactaataattatatataattatatattatatatttaaaaccaaatatttataaaatataataatagggataataaggatactactaatagggataataaggatattagtatccctattttatatatgtatataaaatacatacacacacacttatatgatgtccaggaatactggtatccctgttttataaatatatatggaaaccaaatatataatatataattttatatattatatataattaatgtcactatatgtaataaagaataatgttctatgtaatatagaatatattatatataatatataataatacaaattatatatttaaatatattatatataaatttggtttcacttacagggaaacgttgattcaagtaatgttccaaagtgtgtgaatcaccagagatatggattgtgatctggcaagttcattttcttcttactgttttcccattggccacataatttgctcctggcatatttaaatatagcctggctcatgggattcctgaaattaatagcaaatgtcttgccacataaatattttgttggaaaagttatcagtctgtggatctttaatgtctcaaaataagaataagagcaaaaacagttaaggtaacatcttttctgaataaatttagctgttcagagaaattaaatatgatcattatgtttaataatcatcccatttaatgtatgttatgggacgtacatttaatgcagtgctagcagtatctttgaatttgttgctcaatttctggctcattctaggtaattaataagtgtttgttgaaaaagtaaagactgtagaatcctaacacatttggaatgtttataccttcagctttgatagcttagcttaaacaggccctcaaaatattaaggtggaaatttaattcagataggattgatctcacctcttcatctccactgaacttttgaggactggtcaggaagattttatctaggtaactcctttcttcagcctccttcctgcacttgggagatctttctctgactgtgacaactttggtttctttaagcattgctgtagaaatgcgagactggcgggcaggtgtgagtccagcagcatgtatttctttagaaattttgaaaatgcatttcctttttagattttgaacaatttagatcagtgatacatggtcgcaagagaattgagcaatagaaaggcatatagagtaacaaagcagcagttctgtttcatgtcctcaatcctacttttcttgagggtgtgttacacatttggtgtgtgcctctttactcattttcaatttatttgcacctactcatgcagtgtttttggaaattctcatttgaggctgttcaatcctctcatctatgaagaatagattctcctcagctgccttggccattgtgcagtccaggtgagaggtacatcgtggagtcccaagttgaaatgaaccacagtctagagttcaacattcgggtacaccagagagatgttcatgcttttggaattgcatgcataccagacacatatccttctggtgggcctgattatgctctaagactttttaaatatgcacttttcctaggagttttgaaggtgcttaagaaacctggcttggggctggtttggaaagcatgccctgggatgatggctctctacttcttctggggcctgcttgtctctcctgatatgagcaagtcttgacctggatgtgtggtgaccctggctctcgttatctgggccaagcaagacggggtgaagcacataaaggtgctggtattcctgtggttgacctcccagcttgaatcaatggatgccctccaccctgatgctgagggcttatcttgtgggtatgggtccttcccattgccccacgtctgctttcccatgaaatctccccaactcaccacctccctaacagattctcttgctcttccttgacttttcttcctcttgggaatgttgagaggaggagatggacagatcaaataaagggcttgaaacaatgcctggtatgttaaaggagctggacacatgtgagctattatgggtagtagtaacagcagtagtagcagcagtggcataataaggccgcttataaggcagctcagtaaatgtttagctgctgttattgttattattacatatttgtccttttaaatttcagcttctgtaaacagcaagtcttttgcaccattgcgtgcccagtagtgcttgggacaccctcaggcacacaggagtcactctcttcagttctctttgccttgttaggaaaactggactctttggacatgctttcacgtctgggatcttcttcatttggaacaggagggagacacgtgagcccacataccccacgatggaaaatctctctcgtgggagtctctttcatcagagctgcttttgtaaatgacacaggccattatgctcttcctgtgtaattttatgacttagtataatgactcaaataaccctaacaacagaggaattatagcatcgttttacatgacagattatttcaatggttaacatgtttttcatttcaattaacattcattattttgtctctggttcaaaatagccactatgttaactatctgctttagaagcaattagttttgatttggcaaacaaattcattatttttgaataggcgatttgatagtaacatgaaagtaaaatgcatgtaatccttctgtgccaggaaacaaagactcttattattggagagggatcattctctggtggattcttcatccctttgagctgacaggtctctgtcttagagatgtgataagagaacaaagacaggacagaaaagaaggtccagttactaggactggttatgtatgccttattttttcgatctgtaaaatgggtttattaatagcatttaccctcagagtagttgctatgtgtgaggaatcagggagatgcgttcagggcaattagaccggcatgtagtagccacacgaaacaagttgactgctgctgctggtcttcattatctggaattgctttactccttcagcagctgttcatatgcagagcgaaaacagttttatctaaagttatacaaacatggtagatggcagagtgtactgagtaaaatgaatggccctccttcagtgactgaaagaaaaagtcagcaattctacacgtttttagcagctactttccccattattaaaatatttttgacacagattgttgaatttcattcagcaggattatgtcaggaaatttacacctgtacatgtatttattgctaaaataaaattactctgtcttgccacctgcttgctgtcggccctggctatggccccattatgccatggtcaagtgaaatgctgggtcacattgatgtcttcaaggactcccttggtgtcccctgtgggggaggtcacagggtatgggttggtgagggtggggatatcttagtggggtcctgtctaaagcaagagtgggaaacactgacgtgcggagttgaaggttaaggttgacattcccaggaaccaggacaggagcaccttgaagagaggggttatgacctgggcagtccatcttgcttgtagctgttgccatcttaaaagattgtgcttatagtcctgtcagccactcatggagagttgttcttgtaaataagatgaatgtgaatagatttgtttcaatactatattttataaaaatcctctgagtggggttccaaagaattgttttatagcaaagtaagtcttcaatttgataatatcaacatgtgattctgggcagtactgttaacttgttagaagatccaaatgttatgttaattgagtactacccaataatgttggatgacagttcacagtgtttgaatttttgctctaggctgcatgtctttataaatactactaaacttaatatttcttgcttatttaaaaaaacacataaaatattgtgataaatatagaaaaacattatttcagcattctgatttatcattcctgaatcctgaagattaatatctgctgacagtttggaaccacatcatcagaggccctcatgcagctttggaaactgtctgacttctagagtatgggaatccttagcccgctgatgcacaggggagctccctccacccacttctcagttgtttctagagttttgtgggattttttgctaaatggtttttttttttcatagtctgaattaggatttctggaaacaagagcctgttgaattcttgttgcttaaaacaacacaccatttttgtcttcaccatagtgctaacattttccagaaataaaaggagaaaattctaaaggtccaaattaatatgttcacttatggactgagtaggatcatgtgccaagtgttcccctatttctaagtaccagaagcacaaacatgattaaggcccagtcacctctcttaaggagtacatagtatattgaggaagatagacacaaaaagaactttcacattgtagtgaatgccacagttgggactgaacaggttataatgcttgaataaacaatgtcatggttaactacttgggatgaagtttacagggtcagcaagacttcacagaaagcaatggatttgaagcttgaacaaggaatagacattgttatgcagatggaaaataattgtccagtcctatagacttgaatttgcatgacacgtggaagagacacttaagtggtagatatggctggctggagatagaacttaataggactgcatggcagggaaaactggtatgagcaggaagatggaggtgtccagcatgggcttcccaggcttttagcctgggtgtgccccatgtcctgttggaataataacctcttaaccttttgtcaagttaaatcaaggtgcttgcttggaaattagtcagagaacccaaccagaagtggtcactaggctatggtggagtgggagtgcagcctgactgcctttggagggacctaggaggcttcctggggaactgatattttagccaggccacagagaaaggtggatggaggggagaaatgtgggtcaaggaaaacccacatgatggcacatgggaaagagctggctctgggaaacggctgagagtggctggagcaaaaattgatgttggtcgtggtcagtgtgcatgtgtgtgttggggaggggagcaggtagacagggagcctgtgaaggtaggctgggacagtttaattctcaagcttggagtatagactatgccctaggaggtagggagaagatagaagttttttttttttagacagagttttgtttttgttgcccaggctggagtgcagtggtatgatctcggctcactgtaacctccgcctgccgtgttcaagtgattctcctgcctcagcctcccaagtagctgggattacaggtgcccgccaccacagccagctaattttttgtatttttagtagagacggggtttcgctatgttggccaggctggtctcgaactcctgacctcaggtgatccacccgcctcagcctcccaaagtgctgggattttaggcgttgagccacagcacccagctgaagatagaggttttaagcaggagaatcacatgatcggatttgcacctaaaaatcattcctttgcttcacaaacataatgctgggaatttgattatactttttaaaaaaagatggagaatatacagttgaacaaaaaggaataggaaatgccagtgatctgttgattatctgtcttcttgccatcgtggatggcttgagggttgggattttgtgtgtggtgccatcagcctgcaggagatgtggctgccccttggcaccagctgggctggggtggatttagggctcgctggccaatgagagaaggctgacagaacctgctctcagactaaattgttgtgtcaccccagttgacaaatatctgtgacattgggcataacaatcccatcaagataccttcattggatttcactcttcattgactcaagagaaatgaagaaatatcttgattaaaaattttagtcccttgccttgactgggttagttatttttttatgatttgcactgaattgtggagattaaaatatacaatagccagggaagttatgcttccctgggctcacatatacttgtacataactttacatacttggcctctggaaagagacttcagaatcatgtgctatctccactagagtcctaccttgtggaggtaagcaacagctgagtttgcccccatctaacaggtattcttgtttcattagaattgagagcattcagaatggcttgccctttgtgcccagagcccccaacgtgtcctaggagaagtcaaaggtgattttacctgagcataattcataaccacctgatatcaagtatgtccagcttgctgctctgcaggtatagagccaggaacaatgtttcagaagactattatttataaaactgaaggttggtaatgaaagtacatatgccaaaacaggggatgaaaatagtcccagattgatgctggtttcctgaacaacttccgttcaacaattttagatgatgtaactttgccatatttctcggtgacactgggaaagtcacttcctctctgtgtctctagtttctcacctagaaaataaagttattgaagtagagtagttttaaggtgttttctcgttctgacattctgtgattttgtgattaactgctgagataccactgcagtggtcagcacatagggactccccccaccgaccccgccaccctacagggatatctttagcgtccaggatgcaccaggccctctgataggcaccagtcagcctcacctcgttgcttccctttaatgaacttactttaatggtgaagttcaggtccagtgatagagatgatttgtcattaactggtgattgatagctgattccatcttttcttcaaagccattggttcagtgcttacgtctccctcccttgactttggctaagctcccttaggcttttttcctctaggtcatcattttacatggttatgtctgctccagcaaagctgcccactctttggactttatagcccctttctgggaactcataacaagaattgcttcagctgtagatatgcagactggggactgacccaggagcagggctgctaaatgccagaactacttcctgcatttgctgattcattatcagtgtcagacaatctgctgtgtaaatgatgattaagtctagtgttctgctgaaggaatcacgtaccctaagattaaccccatgctgacagccccctctttcaccacaaggagtcccacccaccatccctttatcagtatcctagaacaaatcctgaaagagtaccgtatgtttgatgaaggataataggaggcctcatgcccatgtaatttataaatgcaaataatagactttaaaaaatccagagggcaaagccaaggtgagcagcagctatgaaagcagtgaagtgttggagagaagaccccaaatgacacacatatgggtgccctcaaagaattttcaagctggtaatctaggttgggctgagatgggctaaagaagagagacacatccctggacactctctacagctgtgtgcatgccatctgaaatctagttactgatcagctccacgactttaggtaagactctggctctcattgagtttcagttttccccgctagtaagacaagcaagttgaacaagcaaggtgatttcaggggacactcataagactttcttctctggttctgtggttagacaggctcagccctgtggcctgcccagcctaggatctctgagggccccatgtgctgtgctgtgggtacctgttgatcctctctgatgtcaccctcaaaggttgttccccaaacagacctttttcctcctaccacctcccccaaattgctagagtaggtttgaggtagaataagaaccaaattaacggtcctcttggctttatgcatctttctttcttgctcactttccttcatttggaagagggtaggttaccctagataccaaacctgaattcctgaggactggagattcattccacacctggtagaaaatatttccgtcttctgcttccatgaattattttgaaaattaaatgccattccaagcctggggactgaggattaatcacatttctatggttatggtaatttcatcctccatacccccacctgtgggggcaagtaataattgtaataatggctaccatttttactgcttcctattttgcaggcactctgctgagtacttcagatacatccgctcatttaatcttcataatatccacttgaagtcaattctattttcctccattttactaatgaagaaactgagatttgtaccattaaataccttgccaaggtcgcactgtgagtgaatgacagagctgagatttgaacttgtactttctgactccagagcccaagcactaatcatcatgcaggaaggccagtgccaaacatttcaaaggcacagtaattgcctgattgatgggctatccagagacgggtagccttcaaccagaactcagccccagggccctgggagtcgctccaagcggtttgcttggagaacagctttggctaagagaggaagggtggcagtaactgcaggcctttatttcagtggtttatgatatagtgatggggttccttccgtggacgtaagtcatcctaatagcgacatttatcattatgacaaaggttagaatggggaaaaacttgagctggaatgaaagagtagaattctgattattttaacagttgaaagtgacatcacctcagagcctctatcaaatggcagattggaagctggactgaaattactttaaaatatatccagagatagttttctacagctgtgataaagtctttcagttgtgttcagaggtgtgcttttgtctaaagcgctcattgagttgcccgtgcgtcctccacacaaaaggctgcctgtgagtcccaggagagtctcagactttggggtgctgttctctgggcacccgtgatatgccacatacggtattggggctgattaagccatattccctcaccgttttttttctttttttttctgtgtgttgtaaaaatcttcccatgtcagtagtcatgttttcaatggctacattgttttcctcagtccatctggtttgttgaatctatgcttctgggacaaaatcctctgcttcctatcaatgagttggagcaaatggaagtgctggctaaggccctcaggatcccttggcctggttggatagtcctttatttatttggccttttattctgggaacttagaggaaagactcatagggtctggagcttcaactaatttatccccttttttctcatctttaggcaaaagaaggggaacgtggcccagaaacactgggttggaccttcgaatttggtcaagtgcaagccctgtcccgtggcacagtcagccatggtctgcggctcagatggccactcctacacatccaaggttggttttcttgtctttttatgttatcaaaaatacttcatgtcggcttgttctaacacttctctatgccaaaactggggcttgggaagcgtggtgggctccaggccttgcccttgagaagctgctgcattagcagactcagagatgttctctggccatggagacaagcaaaataaaaatattctatcctgtgtaactgggctggttggaggggaagaagaagggatggttctgagaatggcatgtgatcctgaagttaatctagacaagcttcctggagaaggtgggatagccagctgttcaaaagaggcaagtcatatagctcaactgatggggagcaaaccagtaagggggggtcgtgatgctgccttgtgccagtgcagtggaaggaaggggtgtgacatcagtgcacacctaattcacacttactgcacatctagaatgcatctggccctgcacaggccccaaataaggcactgttcttttctgggggtgcctcagggattcacagatgaatgggggtagggacaagtgtgtgacaggtcattttaactcaaaccaacaacaagaaaattgtttcacagaaaaaggggctgggataaaatatgtctatttatatttattggagggatgagggaaggctttatttctattggaaagatgaggaaaagcctcttctagaggggcatttcacctaagctctaataataggatttacaggcagggaggcaggggttatggaagtagagaaaggaggtgataatttgttcttggaactctccttgggtgaagtatggccatttgtgattgagaatgggtacgtttcaccaggataatgaactaaagggaaatcatagaattgataggagtttgcttcttcattttcatatccgacaaccatcccctgaggatctaacattgctagactaacattgctagacacaaaggagccagtgtatgggtgcgtgtgtcagggttttctgtaagacatggtgggtgggagtagagctcttgccctccccatctcctccagccagagctacaccattttcatctgtcttcctgtttttctgtgtaaggtttaacttgcagagtggagcccatgactaaagagttgctgtaggggacatcttggtgactcctggccacactgctgcatggttcttgggcctttctgctgggacctccttcttgtcatgctcccactgcacagacaattggccacttctgttctctgtgatcccctcaccaccttgaccctcacaccatggagatgtcacaggctcacgatgatcctcactgcttgctgtcctcagagacttatcagggttatttagaggctgtgaccacttttccctatcgattttgtgatgcacgggtcatatatccttatgattttgtccactaatagttgagttttatcctcccagatgttcacatttttctaacaaaggagaagaaaaatgtgcttcttacaaacaggaaagtggaaaggtacatatgtctggcttgtactcagacccatgggatctgctttaggattcaatagcatatcattgcttgattggttccttggttcattcaacaggttatcatttgatccatttctagtgccaggcactgtgctaggtgctgggaaaatttataacataatgggaataaaagagttggctcttcttcatggccagactcaggaatccttaactctaactccagacctgttctgtgagttagaaattctttgtccaagattatagcctttctcaatagccatagcccatctcagctcaactaaacccacacttccccatccccttactctttttagcccctaatagattcaacatttttgatagtttatagtaacaggacttgcttttgacaccctagccatgtctggagtggtggatttaaaggggacactgatgagtcatttctatcccccattcccaaaggcagatcaggccatcattgtctttcacttaaggcccagatcctaggtgtgtaaacaatcatctggagatgctgttaaaatgcagattctgagatgacaggtctgacattctgtacttctagcagtttcccaggtgatgaccaagctgctggtccacagaccacacttttagtagcaaggatatcagtgtttatagaacccttctaataggtctccctgcctccagtctgccccttctgctaccccaaagtcaatttccacatatccgaagaaggagaatttttgtaataaaagtctgtgtgtctcctctgctaaaaatgctcagctagctctcccttgccactatcgttactaatggggccctccagagcctgcccccttttgctccaggtcactcaccgtagaaagaatctttcattcatttgttcagcagctcttattgaacacttgcagttgttgtatgcactgtgcaaaacatggggtgagggcggtggcaaataagacaggcaccattcctactcacttggaagttaccatctggtagggaacacagaaataaacaggtaaccaagcatataaatatgtaatttcaaattttagtaagtactatgaagcatagttctgaaagagagggttggagagagacttgttttatagggaatggtgatccgggaaggtgtctctgagggggtgtcctttaaactgagagtggaggagtagaatgttccagatagagaaaatagcatgggccagtgcagtaagtcagtgtgaggtgtttgaagaaccatgaggatgcccctgtggagaaacatgagataagaaggagagggaggatattgaaaccgtctaagcagggacacttagccagcttggaaggtgagaagatgatctggcaattccaggctggagggatactcggtattataattgccttaagaatgtgagatcccagaggcagagaccgtttatagtggctgctcaggcatggggtgtagtagatagtggctgctcagaaaacatcattaccaagagaggagccaaaaaagagtctagctgagaaggagtggggagattccagtccgcataactcaacttggatttgagtcaatggggtgcagagagctttgcaatagaaaaaaacaagccatccctatcctgggccaagctgcttagctgaacacccaacctggggctctggcagagacttagcagctccttgcaatgtttctctctttgtgaagatcctgtttgtgctgttctaattattccttccagctctggagcaaactgtctgatcctcagcctgagactggagatgagccatgagatgtctgagtactcaggactgtttgggcaagtggcgtattgtacatcaaaccccagcaaaaacctgctcactcacctctgccactcattcgcaggaggagcttaaaatgccagctccctgtgaaccttgagctgcaaagagcagtggtaacctgtcagacatggctgaaatgctgtcagttgcccgggaaatagctctggaaatgtttgctggtcaaagcctcttggtagtttgggcaggaaagttgactttttggatatgggaaggttgcctgcttagaagtacttaatagctggtttgagaaggattggggagacccctttgcaatgacttcggattcttcataagaggagtggcatatacatactgctgggcctggccctcagaccttcccaaacagcatcctgatattcctttagtgtctttgaattcctgcaccagcctgaccagcttctcagtttcccagacctgcttaacccttttcctggggcagaagaagatgtctaaagccatcttaccaaaggttgtaatattcttctcccatattccgtgtaggatataccgaagccccaaaagacaaggatagtgggagttttacgcccatggtctcctgcctgggtatctgtgatctgttcacttctattggaagataaagggaaaagagtggtgggaggggcactgctgcagtgggaaatggcatgggtgttggttcttggcattagtgtgctagtcttctgtcttatgtgaacatctagaagtttgtgttttctctttcttaacatagtggggcaaatattacttaatctgaagctgtgttttgattgctgaagacttctgaagcagaggacaattctagacccctgtggcattctatgaggcttccttccaagggggctatttcagtctggttggatttactactggagtgttttagacattgctcctaaatacctggccacttatttattgaggttcaaaaagatgatttagtctcagagacaaacctgttggagaccaccagtagatgctcaattagtaagagtgaattagttaactgtaaaggagcaaatgacttcccatcccatggagttagaaccttttttggatcatcggtgtcaggaaacaaaggacagatgagaccatgacgcatgtgtagttggaggtgattcaatgtcattaagtcaaaatcataaaaattagttttggcaaaaatatattactgtccctgtcccatcatcatcagggaaacccacactccataatacataatcacatttttccaggtgaattgtttactccttcaagatgggttccatggctgtgtgagcatcaccggggcagctggaagaagaaacctgagcatcttcctgttcttgatgctggtatctgtccttgggtttcatcaaacaagctttccttctgcttccgggcccccaatagtcagaggttcctagaagtggtggatgcattgtggagtctttgtctacagcaggcctcttctaatgccctgataccagggacaccactcagagctgtgtgactcccccaggatcaaagataaagtgcacagaaaggcacagagtcttgagatgaagggatgtaagatgttacatggcaataaatgtttattcagacactataaagcataatccataaaagataaggaacagaagggtactacagggaattgacaaatggaaggccaacagtgcagctggtttgagagtgtgatatagactctgacccttcgcttggcttccaggcagtaaggatcgccgtagtaatttcttaactactcttgatactgcatttttatggcaaggaagactgaagtaaatttctgactttattgaattcagaaattcaataaatatgtattgagttatttcctactctgtaccatacactgtgttaaatactagggatatggcaaaagacaaaatagacaaagccccagttttcatggaacttacaaggaaggtagacaaattgaaaagcagtctcctttcgttagaatagatgtttagataagggacatttgggaagctgcaggaacacagagcaaggccacctcaaccagtttggaggtgtaagcagtcttcttggggaagcgatggttcaggtgagatcttaaggctggaaagagtcaaccagagtaagagctgggggcacaggagctcattcagtcagggaggagggggtcgaagaggtgagagaaagcatggcaccttgaaggaactggtgactgtcagtgtggctgggtcacatgtgaggtagggaaaggggttcactagctgtagaaatgaggctagaaaagtcaccaagggccacattttgcaggggccacatgaaggggtttggactttgcctgaagagtattggggaacctaccaaaggtttatatttttgagtatgcttacactggctgcagggtgggcatggttggggcaggattggaggcagggtgactgtgagaagcctcctggaatcatctgggcctggtgtgagggaggcctggatttgcagagagggtgcagggatggatagaaaaccatctaaaaaggtatttgggaagctacagctggtcttagcaatgattcgaatttcagatatagagtcattacagctccgagcccaggaggacttcttcaccgtcttcagcttggcgggacttgcaagtcctcctgcctgccgctttgtggttttgtcctggaccatctgggagcccagcacttctggaatcctttcctttcttttctgttatcagcatagaaagagtaaagcttgctgggggcctgattgccagcttttaattctgtctgctggaagagaagcactgatgctgctgactggaccctgggcagcccaggcttcacccaagtgggcagtctcaggctttctcactctggaggagagagctgctttagaaaatgggaggagatctggtgaggaactgggctcctgggagctcagaaaggagcagaggaggaggttgctactgctccaggtcctggctctggttgtggtggggggtgggggtgtctaattgccaggcctcctttgataggactttatggacttcagtcatctgggcccacctgactgaagctcagatgtcagggctgactgctcacttcccagcactgggccttgtctttgaggagagggcccactaagcgccaccactgtgagtcttgagagccagcactgttcactggcatcagcttggctgctggtaatcggcgaccaagcaggcaaacacccgtctgctgtcactcccctccccctgacattctcttccttaattgctgttaaacaattagcaaatggctcaattatgtctcgacacagaagagagacgcagagttaagaactgctgtggaggaaaatgtttctcttcccttctgcctgagcacgtgtgagggaggcgagagagcacttgctttacagggttggcatttctttcagcatattgtcgctgcagattatattattttttcagaggcatcttaatagtttccaacaattgctaccttgtaaaggtcatgtttgaagttcttggcaagtagagtctgtattggccgacattgcctaacaacaggctattctcagggtcggagcaaatcagggttgtgcatgtgtaagacttctcaagatggctttaagctcagcatgacttctctgtctcccaaggcttttatgaccttgtgaccatgtcaggcataggaggtttttatgtgtggctacttttcttttaagcagagttgagactgttggtgttttcaggagtattttttggatagtcctgctcccaccagacccgtgggttgaaaattggctttacttgcaaatggcttattggtgagggccttgcttctgactaagcagaaaataaaattattggaaactgaaggcagaagatggcacttgcacatgttgtgcatccacaggctggaacacaatggcaatagcaatggcgttaaggatgagagcagcagcagcagcaattaggcaagtcactggatgttcccatctgtgcagcactgaggggagatgagaagttaaaattctgatttcatccatgcctactcttggatggtagtggggaaaagagtcttgtgcagatagaccacagtggacaccaacagtccaataaggcagcggtccccaacttttttggcacagggaccagttttgtggaagacattttttccctgggccatgtcagggatagtttttggatgattcaaacacatcacatttattgtgcactttatttctattattattacataataatacacaatgttgtataattattttgttgtaatgaaataattatacaactcaccatagtgtagcatcagcgggagccccgagcttgttttcctacaactagatggggatgatgggagatagtgacagatcatcaggcattagattctcataaagagcatgcaacctagatcccttgcatgtgtagttcacagtaggattcgcactcctatgagaatctaatgccaccgctgatgtgacacgaagcggagctcaggcagtaatgctcgcttgcccactgcttatttcctgctgtgggccggttcctaacagaccacagaccagtagcagtccatggccttggggatggggaccctgcgataaggcatttgggtggtagattttattattttgattttgtttgtattagtccattatctcactgctataaagaaatacctgagactgggtaatttatttttaaaaaagaggtttaattgacttatggttctgtaggctgtacaagcttctgcttctggggaggcctcaggaaatttataatcatggtggaagttgaagtggaagcaggcccatcttacatggcaggagcaggaggaagagagagagatgaggaagatgccacacacttttgaacaaacagatctcctgagaactcttatcacgaaaatggcaccaaagtggggatcagcccctatggtccaattacctcccaccagccccacctccaacactggggattacaattcaacaggagatttgggtgggaacacagatccaaaccatatcactgctgcttagaaaaagccaacaaatgaagttgtatgtgtttggagaagtactcagtggcatctaaccaactccacgtgattttgctgtatacattcaacagtttgaaggttggggacaaacactcagtgtcagatgactgaattttgccttttccacccagtccttgctcattttcaaccttctttccttagccaaatatcatttaataaaaagagctagtttacattatgtgaaaatcctcaactattagtttaaatagagttcatgtactagttttgttagaattatcctcttttctgattttcagggcttttggaaggagaaagtcagaataatatttaaaatattaattgtgtgttagttaggatataggttgtagctgctataacaaaaacccaaattaaacagaggcttataacgggattacattttatctcttgctcctgtaaacatttaccaaggtaagcagcccaaggctgatgtgcagcctccagactggcaatgaccaggatccttttagtctgctgtcattctcagtgattagaattgctgagcttctgtctctgggtccaggatggctgctacatccagccagtaggatagaggaaaagaaagggggcacaattgcgaagccactagtgttacttctgtttacatcccacttgccagaacttaatcataaggccactgcaagcttcaagggaggctggggaatgtcgtttttattacaggcagcaatgtatccagccaaaataggaaagttacattattaaaagaagaacaaagccggcgtggtggctcatacttgtaatcccagcactttgggaggccaaggtgggtggataacctgaggtcaggaatttgagtctgctcaacatggtgcaactctgtctctactaaaaatacaaaagtcagccgggcgtggtggtaggcacctgtaatctcagctactctggaggctgaggcaggagaatctcttgaacctgggaggcagaggttgcagtgagtggagatcacaccattgcactctagcctgggcaacagagcaagattctatctttaaaaaacaaaacaaaacaaaaaaaacccaaaaagcagagtagatattggggttatccagcaatcactaccacagtgatatttaaataataaataataataacgacagaaaaacagtaattattgagcatattaagcactatcacattgtgctaagtgctgcagtattctttattttactttctgtattatttcatctagctctcacagtaaacctgtaaggtaggtactattgtcagtcctaaattgaaaatgagaaaactgaagctatacaacttttttcaggtcaatatcgctagtaagtagcagagtagatatttgaaccctggtctgtctgactcaagagctgcaatttttacttccacgagtgaaaaaccatctgaaaagtaatgtaaaatactagttgtaatatcagaatgcttttgattttaatgacagaaacatgactcaacccaaaaaaggacagttactggcataaaagactagaaagcatattggggtagccaggccttagagaaagaaggaaaccttcagtgttgccaccactccgtttctttccatctctcgtctttgtttgcttctacttgtatttattctgcaaagaggctttcttccctcagcagagaatagggattttaatagccccagattcacttgctcccagcctagaaacaccaaacaaatttactcatgttttaatcctggcaaaagattccaactagctcattttgaatcatgtgcccttcccttaatgaaatcttatatccaggctgatatggccctatggttggcctgctctggtcacatgaacctcttcatcccaaccttcgctatgaataagagttaagattttttttcagcagaagaagtgggaggaaaagagtttatactgcatgaataaaatttaataagtagtataccacccagtcacattttaaaatattaactatgttagcctcattaaatgctatggccgcatgagcctggtttgagctggtaagaatgtattaaggcatattgtgtttctaggaatgatgggcatagaggggcatgcaaggcaagtttttatcccagacatgttgtttagctgaagaggaagttcatctatgggaatgtgatctagtgtcattttaattcaggatgtttttaaaccatttggcttaatgctttaatactttcttctgatcgtgggacacatctgtccttagttctcccagcatttatttcttcttagaacatgccaagataacacagtctttttggctcctgaagataaactttcaggcaaaatggttattgtgacattttcagaaagcacagatgttcagacatcgtccattgtgaaaatacatccacagaatttacacagactacttaagcatgcagattagtcatgaagttagagcagaaggaagcaattcaactaattattttaccacttatttctatgttctgtatgcaaacatgcatttaaccaagatttgaagaataggttttcatttcttcttctcaaatgccctgagtagaatgccatgtaattagttagtgcttttgttaaaaacacattaggaagaataccttcttgttgtcagttctgttgaatgcacaattaagccatttgataaagcaattacctgaacacgaagatgcttggcctcacttcatcaggagatgaaattaaggattaggtaaaattgcacagcacatgatatctctgcctaccaatcctttaaaagacagaaaggtccctggccagaatgaatagacacagtgctataagcctaattaaatcactgcaaacaactttaatgaagttcatgatcatgtcgcttttgtttttctttaaaggagacaaacagaatattcccttgctgacattctgctctaatgagtatggtcagacttcttcatatttttcaagagaacatttcagcgccaagatgtaggtagggctcagtgaagctgatcttactttataagccctaggctgagacctgtgtgttatatggggaaattaaggaatattaactgggttgggacttaccatgagttgttgccataattgtgtattgaaggaaatgggctttaatgatgctcttatttttaccaaagcaagttttctttttttttttttcccctttcggaaacaaatgaaacatttgggaatctttgtataccatgaacagaacagaaatgcttcttcctctgaacaagggtgtccttcttgagctgctagattctgtccaggaaggtgctcagaacagcaaacctccagtagcaggaaaggccctgtgtccaaataagcgagttttcccaagttctcatccaaaagcagtaaggacagcttttgaatccaaacctccccaaagtcaggctgtacaatggcaggcaggtaagaaacttggatgctataggaagctggtgaccccaaacagtttggtcagattgagctcattagaagtatttctttgctttctcttctccagtggagaggccaaaagatgatatgtatcagtgagggtgggatgccccaaaggtgtctctaatcaagattcactacatcatgcacgttgtcttctaccattttctgctggaagctatctagtccagccacctggcttctctttataataaaccaatgcacaacccaactccctggcaccaaacaagggacaaggagaggtggaatggagagaatgcatcaattgtttttggcaatttaatgcactgtgatgatccctcacccacatctagccctacaaaaaaggaggaaccattttcctgggattttaactgtaaggcttatcataagcaccatctcctcagtgaaccctcctgagccctttgtgccaaactagaccatttctttcctgtaaactcccctgttggagcactgattccatcacattggaaatgttgttgtacacgtggaaatccagccgtatgatagactagagtccctgaaaactctctgataccgaactcctagttataatgcagacattattttaatagttgagcttgcaagatgtaagggaaatccctggttgtagggagagaggagcactgaaatccagacagaatcctgaccatgactccggggggtggggaggtagggaagctcaagagattttaaggtaacagctgcatgcttcaatgcaataatatgcagctgttgccccaaaacctcttgattagcttgactggctcctttccgttgactggatacaatgccttaagtcctaacatagtgagaagttggagctgaaaccacaaacataaatccaagaccttcagtgggttcaccctgagttaaagggtgggagatatatatatacacatgtacatatacatacacatacacacacatgtacatatacatatatatacatatgtgtgtgtatatatatgtgtacatatatatatatatacacacacatatatatttttttaaatctgttagtaaaacagggcaaaagaacacttgcctgtttcagcttggactctggttagagagagaaaagatccctggtgaaacttttataacagagaacgtgcattcattcagggcaaaggttttacacaaaatatttaaagacatatataggacacagacataaaccaatcagaaaaagtagtggcaaaaactgcaattacttttgccccaacccattatacctcaatagagccgtttaaaaagtatgtatgttaaaaatgagacctgtggagggtgtccagagatcagcacattcttccagtcacccacgtttgtttctgtgtttctcatttttgatgctggtaccctccctcactgagaaagatcctgctttgctctctcatctaggctgaggaatgtcagaaaatggaggtgacacttttcaaatgtttttccagtgaaaaattgaaagataaaaaaggtgtgggcaccccgaacactcaatcactctggactctcctttcctgaagaaagtctgtacttgaagcatgtcctggattttaacatccctttgggaacaaagcctgctctcatttgttggtgttgcccttcttccccctctttgagaagaggtcttgggggactgagcagcagccggaggagccaaccaggaggtggctgaggttgcagagcaggtctcctgaggtggcccgtggagcctgtggacccggtggcatttcagagaaaatctgctttggtgggagggagagttaaggctcatggtatggcaagaataaacgatgcaaagtctctaagtatctgggaggcaaaaattgatggtcagtgcaggtgagggaagagcaatgtgttcttgacatggcctctgagactgatgtgacaaagctttcagccatgtaggtgatgggaacaagagaggttgtacctgtgaaagttatgtgttgggaggggccactttgtcttctgactgcaggtgttcaggctccatccactaattccatgctcagacctttagtccatagagttggatgaggtcacagacttttctggcacctgctttgggatcctcttccagggtggtctctttaaagtcatctaacacacccaccctttgccaggcccctgctgggccactggtcctgagctcaggttgctgcctggttctgaggaagacacatatgtaaatgtagatagtttcacaggtcagccaggtgaggggagtgctggaagtagagccagggtgaggtactgtggggaagaggagggctgggtgcagcagtgtccgagttaagagcttgtccttggcttgttaggtatgtgaccttgagcaaattacctaatcttcctatgctctccagtttccttgtccatgaaatggacataataacacttgtctggaagagtttttgtgagaattgagttattacatattaaattcatcgaacagtatgtgtcacattgataagccatctatcagtactcatttattactaattaccccctccccaaggaagtctgaaggatcttttgtagcacaccagtcctccccctagctccattggcccagcttttacattacaccttccatttgcttcagaaagccttctctgccttctgctctcgggtaggtgggattgcaccatgttctgcccgatggtggtggtaacggcagcaggcacctctggttgagggcagactctttagcaggcactggctggggcctggcttttcttactcattattaatcccgtggcagcacccaatgtggcagatgcagtggtatttgggtccgttttcattcattttgccaacatgtagtgagcattaggccacagcaggttcgggttagtttttgttagtgaaatcagaagactcttacatagactgtgaggctccaataggaagtgaataaaagcctgcccagcattgcaagggggaatgtttttgcacactcagttgttctcctggctctctatgacatccccttatccccattccaccatatatccatttgtccaatgcttgctcagctcctctgacatgctcagtctgtgtacaggatgctgaggcaggtgaattgagctggctgcatttgctagagcttgggaatagttatcaggctttgctcgaatttctaagccacggctcacatctctctgagacagggttatgttggaagactaagcgagcagcaactttggttgctgggatgactgtactggaaccttctcaggtctgccaaatgtgcaagggagtcagaaaactgggcttagaactgcttttgctgggcaagtccccctccctaataaattaagcaaaagcagcccctctattcacaaggccagagaccagagtctaccccccagtggccagcttcacttcccttgacctgggcatcatactccagctcctccctgtgtgtaagtaggtgtgatttgcgtgaacactagtactagtactacattactgtctgctgtgtgccacctgccatactatgcacataacatgacattacataattctcatgccagtctcgaaagatgggtgctactgaaaaacctcttcttcagataatgcagagagggagactcagttattattaatgctcctgtgctcccttggcccataggtggaggagccaggcttcaacacatcaccctgactcatagagtccagacagccaagcgtcctccacactgcaaaagccactatgacagaactacaccaattcacactaacctgggaggggttgggttcagttaacaatggtaagaagactggattttaaatatgtttacataattctttaaaaaatttttttaaaaagatactatgactacagactgagggtctgttaatactgccttggcaaatgagtgcaaacgatggcttgggttggctcatcgatttcttggatacaactatgtgctgtgatgattcattttcaagtatcacaagcagcctcttttcctgagtagttgagatgttcctattgcagttatgcctgcgttaatttctccctttgagtggaccgtttctttcccaaactcctgattttatgatcacaagcccagcccaggatggcatttcactgagcagaggggtctaagtgttggtgggatgaggtggagggctgggctccatagaccataactgaccccattggtgctgcctctctgcatggtaccatctcccaagtacctcactcagaagtggttgtcatggaaacccatttgggttcttttttttttttcttttttgtcttgggaagggtcactgttttattacaactacctggaaagagtggagtgcccagctatggcagatgagtatagcatactgctgagcaatttcagagatggctccagcagtatgctatacttggggggctgaggatggggtgaaccacatggcatctctcagggaggccactgtgtataccaccccattatcatatcctacaaacaaagtgcttctgtcactcgccttcagtgctgtcagtctcccaaaatctattctccttgatgaccccaccccatcaatgagggaggctccctccttccccctgcccacccacccatctacccagattcttctgtgctattagaagctggtgctgtggggagggaatgagggttcctgaggttacttggttttcacagctcacaggttttcttgattgcatgttttgtagatccacatttttatccctgtagctgtcatatttttgacctgctatttcagtcactcagaacagtattactttattgctttggaatttctaagacttttttccttcctaaggtttccatcaacctagggataatactggctaatgataagaatggagaaccacagctggctttactgagctgcttgccagcctggctgtcataggagcagtgctggtgggcctgtgtgcagtgtgtactctgtgccaggtgctactctgggagtttgctgctcaccattatatctggtcctcacagccaccttgggatgcacaattctgttttcatttttacagaagaggtaaccaacactcacaaaaaggttgttccttgcctaagataacacaaccatcaatgacagaaatagaatctgaacctagacttagctgagcccaaacagttttggtctttggttaataaaggcatacgtcattttaatgaatgttcttttattgtgctttgcagatactaaggttttttttacaaattggaggtttgtggcagacccacattaaacaagtctgttggtaccaatttttcaacaatgggtgctcacttcatgtccctgtgtcacattttggtaattcttgcaatatttcaaactttacaaattattattatatttgttatggtgatctgggatcactgattttttatgttgttattgaaattgttctggggcatcataaaccactccaacataagatgatgaaattaattgataaatctggtatgtgttctgactgctccactaaccagccgttcccttgtctctctccctctccatgggcatccctgttccttatgacacaacaatattgaaattaagctaattaataacactgtagtggcctctaagtgttcaggcgaaaggaagagtgacatgtctgtcactttaaatcaaaagttagaaatgatcgtgcttagcgacaaaggcatattgaaagatgagataggccaaagccaggcctcttgtgccaagccaagttgtaagtgcaaatgaaaagttattggaggaaattaaaatgctatcaagtagcatcacattgctactgagaaatttttgtgaaaggaagagtccatcaattcagcaaactttattgtcttattttcaggaattacagccaccttaatcttcagcagccaccacccttatcagtcagcagtcatcaatatcagggcaagaccctccaccagcaaaaaggtcatgactttctgaaggctcaggtgatggttagcattttttagtagtaaaatatttttaaatcaaggcatgtacattatttttagacctagtgctattgcatccttaatagactatactatagtataaacataacttttatatgtaccaggaagccaaaaaatttgagtaactcactttattgtaatatttgctttattgtggttgtctgggaatgaacccacaatacttctgaagtttgcctgtacttgaattttatgaagtactaaactctcctggtttaatagtggtgaataggaatagcatggtgcatatgtagagtagcttttgagtggcctacttgaaccatccaccctgatgtctggttggcatctcacattcaatgtgtccaaaacagagctcctgattttccttgggccccagtgtttcccccaatctgctaatgactctattctgtgcccagtgactcaggccaaatctctggagtcatctttgttgattttctctcattttgttcaaccaatccttagcaagccttgtcttcttcactctaaactatatcctgattttggccacttatccccattgctactccttaaacactggtgagagccccagggacattgcatggtctcattactggtctctgtttccatcagtgtttgcctgtagtctgttcttcacagagcagctgagtgatcattgaaacagcctattcctttcccctcacttacaagtggtgtcctcaccctgctcccccaggttctctatgatctgacctctgtcttaccatgtttttctcatcatgactctgctccagtcacttgggtggcttttctgcttccaatgtgctgagctcgtttcatatcagcgttttgaacatcccgttccctctgcctgcatgctgtttccctagactgtcatgggactggctccttctccgcatccccatcttagctggaaggttatctcctcagagagaccctctctgaccaccacacaacagagctgtcttcccctcattactttctggcctattgctctgctttcttcataccaattacctgcatctgaaatctcttatttcacttgctactcaagactgtatgctccataaaggcagagtccatgtctatcttatttccgtctgaatttctagaatggggcctagcatatggtagattctcagtaaacactgtgaataaaaaattaaatgattaaagtgctatagttctcataatgtgccaggaaagctgctggatggaccattggatttattttagtccagaatctctccagggctgagagagaccctgcccttcttcagcccccagtgaggatgctagcctcttctaattgctctttcaggatctcagggagacaaagagagcacaggatcatgatggttaatacagaaatcctgataactgctgctatgatttgaatgtcccctctaaaacacatattgaaacttaatccccaatgtggcagatattgagaggtggggcctttaagaggtgactggatcatcaagactctgccctaatgaatattttaatgggttaatgttttaatgggttaatggattaatgagtcatcatgggaggggaactagtggctttataagaagaggaagagagacttgagctgacccattaatgtgctcaggcccttggccatgcgataccctagacagagcccccaccggcaaaaaggctcacagcagataagccccctcaacccaggacttctcagcctccgtgactgtgagaagtaaattcctttcctttataaattacccagtttcagcaacagcaaatggactactacagttgcccaaacactgatgtgtgcaagtgtgagtgctggaaagaggcactgtgctcatccatccatccattcatcgattgatcttttctcctattcatcaggaaaggactgggtgcttgttcctctctaggcacaggatatacaaaaatgtactaggcaacgtctctgtcctcatggaattcccagttcagaaggggagatgtattgaatggtttgagaaaagtgggtgtgtatcaggtgggcacacagtaagagaacgtctgacctcacctgggtatcagggagggcctcttgaggaggtaatgacagagttacataagagaagtgtcaagaagggcctctggcagaagcgccaagtggggccagccttggacaccctgccctccccttcacacacttgtggcacactcttcctcctgtaaatctcagcccctcggtcgcttcctcaggaatgccttccctgagggcgaaccagctcagggcctctcgttacacatctcaacagcaccatgtatcttttttttcttagcatttgccatagttatagattaattttgtatttgtaagattatttaatgtctgtatactccagtaaactatgaacatggaatacaaaccatgtttgtttgtggcttactgctttatcctcagaatcttgtacaatgcctgacacagagaaattacttaatggacacttgggtattggaaggtggatggagtggcagggagtatgggggtagatagggctggagaggtgagcaggggccagatcaggaaggtctctgtcgcccactgagggacttgacgggaaaataatggaaatgtgagtttatcgtgtttataaggaactgacataattgagcactttggggattctttctagtcttggtggatgaaatagcttcatgagtaaatattataaagaatctgtaagagcagatgagctcccatatgcaaagagttttcagtcctggaaagaggggctaataaacttcaattcaccatccagtgtcctctgtgtaccttggttccaggctttgtgcccagctctgggaatgcctgagatgaataattcaagctcccctgcctggaggcgctctctgtttgaaggggagggccagtctgtgatcctccaacagactgacagtgaggaaatttgaactgctgaagctgtgggaggctctgagagcctgagagccaaggggagtggcaattaaattaaatgtggctgtcaagggaactgttatttttatttgtccttacctagaaaccaaaacataaatgtaaaggctgccagtgggcaccactctcagtagacatgaacacaggccttctccaaatacatcccagggaatgctgcctggcattgatatcatgatgaaggatagtgtctcagcttcatctacagcgagggttttatttggctagcataacccttggggttgtcttcttatcctggcttgggtgtgttttgctagagcctttactttatattcacagcacctactactgtgcttagcagctagtaggtgctcagtaaatgttggtggaagggtgggatggagcagggaagagatagtccttgggaggataggagaaatgacctactggctgcccagattgaaagcagagtccccatgcttgtgcagaaactggctgatttgtgacacacatctttgcaccctctttagccaactctcctatgctcgtgtcttcatcctcctcagctcccctttgcctcctggccattgaacacagaggatcctgtggccccattttcatttctcttgtgctacctttttttcctgggtcctggctcagttccatggctgaattagtatgtaaagagatgggggtggggaggagagggctttagactggaatttgaaactgagccagagaatactgaaagaaagagaaaacacttcatgactgcaggtgcctgagcgtctcaggagaatcaagttgtatcttgtcaaagccccttgcttgaaaaacccaggggaacaaagagattttccttttacagaatctgcccattctgtttgtgccatgaccctttttcctcctgaagcttgggattgtgggatatttgagaggtatttcatacttcagggatacaactttacatcacaatcaagctcgaccgaattctgcccttccattaacttcagccagcaaaggtgcctgctgggtccccatgcctggctgtgaggtgaggggtgtggagatggctggacatagccttgtcctcaaggagttgacaatcctagctatctcttaacttatgctggctgggcagtgagcaccactccagtggaaggttggttgttccctgaacagtctatgcttgtgtgccagatgcctgtgatctgcagagggaggaaggcctggatatggccagaggcagagcccagggtaaaattctgtcttacacaacaaaagagaggtgttctggtattcacagatgtgtctgttggctgattgcctcttggtgggaagtttagaaattacgtagcagttttgttgacaaaaggatgaactccaagttgctgttttgctaaaaattacttgtttgttcctgaggcaggctcaacccttcttcattgaaatacaaccttaaactagcagcttgccttgcgtgggatttgctttttgttagagaaagtattgcttccatttctgttgttctaagtgatgggccatctccaagttgattccgtatctccatgtagtcccaaccaaatcagcaagcaaaaatgccaagtatctagtgttagatcctagtgcttacacctggcatggttatttgaggagggaaatgctgtagcctgccagtggcctctgtggccttcctggctcatctcctggtgtatttcagaagaggcccttttctttattccaggtcaaactgtgcagttatctttgatagttataaaggcctctaacctagggcttcacaaaatgtgtttagaaatgtgaatttctaaaaatgtattctcaattgagaatacatttccaattttgttactcaaaatcagtgtagatttggcgtttctgtttcatcatgagatgatgcatctgatgggactttggagttgaggggacctatgattttagtagagacattaaagtttattaaagtttcatctgctttatgtggcttctgaacagcagcctcttgatgacctcaggcactggcaggtgtggctgcactaggtcactgaggagatgctgaggggcagcagcacagttccccaggtcctaggtacagagaagagcttgctggtgccccactgccctcaggtcactggctccaaggccctctgctatcatgttgtagctggtgtgggaggaggaggagggtggccacttcctgtgagttagtatgttggccatgacagctgctatattccatatgagatgggagctgtcaccacaattttgagtctgggagcaccttccctagaaggactaaccagaaaattagaaaatgctgttgagacacagtggcttctgaagttttgttgttgttgtcgttttgttttgtttcagtttaattcacaggcagtgtcaaagactttgacactcatgagcagggacaaagagggggatgggaagccaggaaggtggcactgtgtaggccccaccaggcacaagccccctcctcctccccttgcacctgcatgtctgtgctagctccccgttctagtccctcctccattctcctgctcagcccccttgcaatagtcccagtgctctcctggcctcctctctcggcatgttgactatgcttctcctttgcttgagaacccacagtagaagcttcttgcttctcacaagaccagacaccaaattagattctaaacctgtttcttaacctttttgctcctgatctcccccatacatcattctttccaaatttttcagaatcttgcaccaagttgcacatccacctggaagattctccctacaatggctttccatctttcaacccccatggtacttaagttcccttgccatggttcaccatgggattgtgaccgatgtggtatcatatgctaattgatccatttgttgatctacctcaaatctctttaagggcagggactctgaccttactaccttttttgtgtatttctcaaaatacctactcctgcaacacaaagatgactggcatgaaaagctaatgatatctggaggactgggggtgaaggtgggtgagacgaggggcaggaggattagcaaactttctctcagagattgatagatttggcatcctgataatgttcttttttatctttctttacaagtgcctggaagcaggccgatcaggtgatttgtatccaaaagtagaaacaaacccatatgggagatagacatcgttcgtctttcaagtatgtgagaaattgctgagcaaaggaaaacatacaaccagctcacattgataaaaccaatgtggttacgaagttcaggtttacccgacaaatatgcaggagaaggatgtgacttcaagtccatgacactgctctgagacttcagtcacattctgtgagaggtttgtaggaacagaagctgtaacctctccctggagagggacccagattagtccttgaggcaggatgttctggtggctgatgaaggtctggaggggagcctagagctcatctagtccagcctcctgtggtccctactccctgacccccagcaatcttcacacacatggaatctagacctgacaagctgggttattgtctaagcacagactgcaaccaaagtctccccacttccacctaagagctttacacgagaaagtggtagatgcttctgggcaccaacaggcttagagaaagcatgtagtgtcgtcagctctttgttgcagaaatcctgggtgggaggctcctagatacagcccacccctgtgtttcccttggtttacacacttttttctgtttcttcctccctgcttcctgacctcctttctgaaccttctcaatgttctccctctcgtggggcttggaaaacctttcctaaaacctctgaaagatccagcggaggctgggccccttacctcagtgtatcctgcacaccaaggtcctggtgctctccagggccctgccctgggacacacatggcagtattcactggaagaggtgctgccagcggctgcttcacagagaggccaagtctccagccctccctgccatgcagaggccccaggttgcaggatttttgagagtgagagacctcgtggaggtagctcttttagtgaagaacttgatgacaagaataacagtattaatgatggtgataatagcaataaaatggcttctgtatattgagtgctgcccagtgctaagcactttacttctgtgatctcacttagtacaaccccaaagatgtcagtggtactagttctctctttagagcaagatgttgaagcgcagagagatatactgccttgtttgagttcatgcagctgagcccatgcccagacctattcctccagcagtcagcccttccagatgcagctgcacatgtggctttcaccttgagagaggaagggagcccacctagtgacacctccctgctgcagttcatcagatgggagggaaagaaaaaaagactgtgcctggctcccttcaccattcccggtaggaagcttttctggtggctttttgttgtatcgatttgattaatttcagcaaatatctacaaggatttctctagttgctggggaaatgacagcttgttacataacaagagcagttgattggaactcagaaaacattagtcaagtctcagctctatcttgtattatcccggtgaccttgggcaaatcctgtgacttctgtgagtctcagtttctccatccatcagacgcagctggcttcctaggtcccttaaaaacttgctgcacagtaaaaaacttagtagaagggagggcactttactaagaataaggtgtagtagaaagctaagtgtttcttttccctattattaactcgaaacatgcccattaaaatttaaactttctgggatcaggaattaggtctgccataatcctgctcagctggtagcttcagtgactagtgacatcaggcacgtgacaggggctgcacagacattgcttgcatgacctactcagtggatgcaggaatggtggagggagtgaatgccttatgcatggtcattccaacccggcatacagaaccccagccagccacctcccgagaaggcctttattcaatttgggttctgtacacgatgctctgcctcctagaggatgattttgcccacactcagagtaaacaaagagcctgtgccctcatgtttgagactttcttttgtgacctcctccctgagggctgctgagtgctgctcagccctgggctgcctttgtggcctgggtgcggtgtcttcccagcagagatgctgctactgtccttgtccagtttctagccccatctagctgggaactggaacgtggaaggtaagccctttatatcttgtagcctgtggggtggctaactttgtccctaagtgaaatttggtaactgagcagtgtgagatgcagtgagagatgcagggaggggtagaaggaaggagccccagagctcaggcagaaggtctggctccttagtgagggtcaggtgtgctttgcctccaagcatcaaattaacccagtgagaaaagggagatgggtcagatggggagtccctgcgctaaatactctatgagcattttaaatttcatttgccttaaaacagcatttgaaataggtactattacctctagtctatagatgggagaacgaggactcaactatgatgttgcagaaaacactgtaggtctgtcactctgtcactgcagagcccatgactccagcctggaataacactattggggcagggaggaagggctttttgccttgggtgaggaggtaaacaaacaatggtgagatacagctttccacccatcaaactggcaagtagtttaagaaccaagcatgcttaccttagaggtttatcaagaagatcagatgagctaatggatgcaaagctcaactttagtacttattactcagtttctgtcatcgtcatcaccgttaggcattcacttcaggaatgactgaccgggagtggagctgggcttttcctttgttatgggtgtagacctggcttgatcttccttcattcccttgcaaaaggtgagtgttcttcctccccagtgtggagacccaaactgttctgtgttttccaggacactggtctctttctctaaagccatctccccacaggcctctctatcagtccccgcttccttctggaagaggcatggccagaagctctctgtgcagatggtgagtgggatcatctcactggggctgagctgctgcttggggaaatgtcactttctgctcttgcctcacaaatgcctcagagctgtggttggtgatggccctaaatttaaatcatggcttttcctttctagtaacatagaggtcctttctgaccgctaccctcacgcctgcttcatgctgtgctgtccttgtcactggccctgtgagcgtagggtgggccaggtggggcatctccagacagccccagtagtgccacttagggaaccctccgaccctgaggtgccttgccacctcctcatgtggcttgttactctcagcactgaaggttctttcctttagaatcacgtatttagttgtcttctagatacatgggacatttttctttttcaattttaacatgttttattgctttgttctgattataaacccaaacaatgtgtgtgatggtgcaattcttttttttttttttttttgctttgtataaatctcttgccttctgatgaggatggatcccaaagcaagtgctttgcttccttagagggatatgggtgtaaggaccccgaggaaaagcatttggagtggtgtagtgaggttggcatggaaaggtaaaggcagccctgggtcagtggcagctgagaggactttcagtggagattaaaggatctaatagagtttcttttctcttctcttttcttttctgttttttgttttttgggtttttttaggcttggtaaggcgctgtggtttaaccttctcctctgtggctctatgaaatctttaacagagcattcctttttcactaatgtgccttaggacttttggtgagggaatcaaagagtattagatgcatccctctctaataggggtttcccagtgcccctgccacactgattctacttggcctcatttccatcccttgtgtgtttcctgtgccctagaaatgcccctggctggcactggtgctcgagtctctgccctcctggagctcagtctggcaggggagaagaaagacgttatccatgccatggccccaggttgaatgggaagttataggcagtgcactgccctggccttgcaattcccacaccactctgcagcttctgaggtgtgtcctgctgctcagggatacccttagcaagcagaaggaggcagggccagcttgtggggatggaatttactgcatctttgtgggcaataagtgaaatgactgaggtactctgggcacagtttcagaagtgggatggaggcaacataacagccatagcttcctgagtctgcatggggtggaggtggggctggcagagggggatgagcacttactctgcactgggcactgagctgaactctcatcataatcctggctaatcctggtaacacaaagaggcaggtgcctttattatccccattttacagatgtaaaaactaagtctcaaagctgtaagtgacaggctgaaggtcatggagtgggcaagcaagagctgggatttgagagcaggtttgtctgcctccagattctttcctctcggtgatattgtcttgctccagagcccaggaggattcttactgcattgtagctcactcctgtcacactggagggacaggagcctggcaaacttccccaagctcaaggctttaggaatgcccattccctccataggctgggtattgggggcgatgtgtgtcccaaatgtaacatagctctcacatagcaagtattcagttttcggctctcccatagcaagtattcagtgtctggcattgtgttaagtacttcacacacattgttttatttaatttttttctaatacctggctttcatcactagaatgtaagccccaagctgacagcagccttgcctgttttgtttaccatcgtatccctagcaaccagagcactgcctagcccataataggtggtcaacaaatatcagttgaataaatggagtgccgctgcccattgagggaggcatcatggtttcccccattttacaaatcagaaagctaaggcacaggagggttaattaagttcctcagagcttgtaaggctggagccagggaagatttgaacccaggttcatttgtttagagcctctgcttccgccactctgctgctctggggagtcagcaatgtggctcccgaggatttgagtagctgatgtattggcttccctgtgagctcacagtgacatcctcttaaggcagtgaaggaaaggagataattgataagcttaattatctgtggcaatgacatgatgagggcgccacaatgtgactgctcgttattactttgcagtgcagaattccccaaaacgggagcacacatattgcaacaggcaccatgagacaggagccgttctattttgttcacagggtcccccctcagagcttggtgttagagtgtttgagaaaccacttagctgtatgaaacacagattatgttagatggagagcagctagcttcctggagatcacagttggccttcgttaatgaattttggcctgattaacacaggattcggactgacatcaaaatatgcaagtggaaacttagtaggagggggaggagactagtttgaactttctaactttgaaatcagcggaagagaaggctcgtacaaagcttggaactgaggactgaatatgtaatgagctcttgggtctttgaagctgccccactttgcttaggcctctgtgggccgaggcccagctcagactctggggctttcttggctctgttccatgcccaagcatacagccaggatggaaatctaaggctgattgaccctcaaaagttgtgccaactgcttctcttgtatctcttttcctaaaaacctggatgcttgttatgcatcctcatccaatgtcaccattccctgaaatcttcacaaggacttccagaggtgtcttgtccctgaatgcctgcgtctgtatcacagggtttgtgttctcacccctcttgactgcacccatgccacctgcttctctgtggatctttctccataagcatccccacccacctggttaggcttgtggcatcttatcccaatagcttgttgcaagtagctgacatgtctctcctccctttgtccccatgggctggcctcctggttctagatctgcttctttctgtgcacaccaagaagttacccagatatttgccttcccacatcagatgtctgcatcccacctagccttgtgagtttgtctgctcaaatcatgactatctcaggatcactggggctgtagttctggcctcaaaagtaaatagaaaaggagagtggggtctgcatggaccatgtgacttgggcgtttctggccatggagcaagtggtgggagcaatcagcacacaacttgcctcgcagggcagaatggtcaccaaggcaggcctgttggggcacctggcctagccagctctcctttcatcaggctctgggagaaatgagatcagacatgttgcagaaaaactgtgtaatcaaaagaaaggaaaaatgacagtctttgtccagcccttgaccattttcacacctcagctccatcatcagagaatcgactcttgcaagggcattttgttacttaaacgtatttttcacagaggtgatgccaagcaaagaaaatcctctttgagttatatggctttttcgttcagcactacagcatctttcatctctaagcagtaaaatcaggcagtaattcaaagtttaagttactgtttcatttaaaaaatatcactttaatcttgttgcatttggttaaaagtctgctttggcatttttggtcacctttatctgtggtttcgtttctgttggctcttatggacatacgcaggctttattcagaaagatatttggggtttattttctagagcaagtgataggggagaaaggaagaaattgggctgaagtgcagaagtaaagcaggctgaatggttggtgatgggtgtcttatgtcagcccaaggtgagatcttaatggctttttttgaccttggacagtgtcagctttggacagaaattggtggatgtgcttagctagtatctgtttttccattttcagagtacactgggggcaaccagggatggaatactgcctctctatcactttaaaaatctgctgttattctttctccgtctgcatttcttctccctgatctgtgaagtctctgtaggtaagcgaggagaggtgtttttatgcagagagtctaagagaggtcactgcttcagaaactaaggctcaggagcctgccctctacagtgtgttagttatgacaaagaaacacagacagcatgaggagggcagaccccaggcctggaatgcccctcagaaggctgatctgcagagatgtccagggacaggaggcacagcccccctgctgagggatcagaacagaggagctgttgattgtctgaactctgaatgataaagtacttatgaagcctgcaccctcgggagttcagaatcagttcagaattggtttgaagttgcaaaagaggccattactgggctgctttgtagcagttatagatctgatgtagacctctgttcgctctgaccttcctttttattagtgacgtggtcatctcacccgtgccttctggtggctgtgaagtgctctctctgatacagccacttagattttctgtagttttcttcactcatttcaccaagaaacttgttctttctttggtgatagttgtggcagggctttgtggggcttgctttctatctcattcattcattcattcttttactcaaggaataattaaaggacacctactgtgtgctggctgtgttctgtgtgcctgggatacatctgggaatgaaaagaccaagatctccacccctggtggagcccttgtttcagtgagatcatggcaggggttctatagagacatccgggagggacactgtaactctgagtgtgcactaccttggtacagttctcagagaattccttaccatttgtgtgacttggctttgtttggaagataatggttcctgcaggtaccatgaactgacagagaagaccattgtcagcacagccctgaacactgtgaaaacatgtgacctgagcaaacatcagaaaacattttgacttgagaccacataattaacctcttaagagcacagactttagaatcagatagcctggatttggactcaggcttcgcaaggttagagctggctttcattggccaaacgacatctgtgagcctccatttcttcatgtgtaagatgtatgttgttatcatttttatcatataggggctggggtgaaaattaaaggagaaaatataggtaaaacttttagcacaatgccaggttcatgattagttatattaaaccttgtatacattatgaagaattagaagccatttctaccagcactgtgaagaatagaaatatacttagtgctcgtatctgtattatgaagaatacatagacatatgacacaaatatcctgaagtctagcagctaaattataaaatattagagggtaagaggaaaccagaagagcaggcatgggacggtgtgttgttgagtggggtgggctggaaatgtcactggagctaaggggggtctgcaggagtaggagtggtcagggtcatgtccagaggaggacacgcctgggtggggaaggtttgggatgggaaaagaaagaggtattcagatgaggcaacatcagagtgaagcagggacggggaggaggaagaagacagctattaaggaattgttgcatgttgttgaagagtcagagcagtgttgttgaagaagcagcatcagtaccagatggtgaccagcatcaaaagggaggacttgagttttgatcagggcttgagagcaaaatgttagtttgggatctttggtacgacatttcactaagtcggggggggggggaatcagatgggatggtaggagagacagtcaaagctttccatctgttggactgtgacagtccagataccattcatggacctaaggagtatcaaagcctggagatggatagagatgacttcatttggccaagtgcattggagatgacaacagagctgtgtcgattgttcagcaggtggttagatgggtggggctgtccctccatcctcctgcccatgcatctatatagctgtccaacatttatttagtacatactcttttttagattcttttccaggcactggggctaaccaagtgaattaaaacctagtcctcatggaactcataagagagacaggcaagaaagctgtcattgaagtacagggcaagagacagagtgttagaggtgggcaggtgctagaagtacctagggatgcctactgcaggctcctgggggagctgtagacaaagcaaagcatccaagaggaagcctcaagggacatggccgaggagaccgagggggagtaagcgtggtctgcaagctgggtcacagtaagcatgtgtttggagagacataagagatgtgagtggagagatatgtggggtacagatctctggggaccttttctgctgggctaaaagtctttactttttgtctgaggatagcaggatacaaggaatggttgtaagctggggtagggtgtcacaaacacatttgcattttacagagatcagtccggcatggagaagctattggaggaagaagagaatgaatgtgggctttggggtatggaggaaggagcaaagattaattgtctaccatgtgccaggaatgctgccaggcactagagatctagagatcattagttatcctttctacttccaggatggctgcaggaagtagggattatctttagtgaggaggaaatgaagacttggacaggttatgtaaattgacctgcctttaaccccagtaagcagtggcgccctgggtgtcagattccctactaggtttgtaatgagagatgcagacagatcctgggcagagagtttctccctacccaccatcacagctggagaggtgtgagtcatgatagaatcaggtgccacctcaacttgccctccacctccggtgaattctgtctgtggagtaaactgcccgagccagtggggaacaggcagcatggagaggaggcttagtgtgggctgggtcccctgcaaggaaaccaggacagctggagagacaggcatctcgagggcatttatagctgcagagacattttaattttaagcaggtgccagcacctcagaacatcctcttcctttctcctagcgctgcctgagcccacatatccaggctgggcgagagacatgtgaacgaggtctctgctcccacattgcctcttgcatctcccaagtctctctgggatgttttgtgcttttttctatacttgaagcatctcctctgttctcctccttgtatttcttctctcttttcttccctcctctcctctgccatgcctcctctacagctttcttttcttgctctctccttctttcattcttatttgtgttctttcctttcttacccttttccttctcatctgtaaaatgaaagtgatagtctccaacttcctagagtttctgggaagatgatgaatttatttcagcaacctcttcctgtccactttcaaggtacagcttatatgtggccctagggtgtatgagcatggacagctctctctaggagcttgcatcaggtgggagtcaagttcggagaccagatcctatgaacagaactgtcttctgaggccctggctgggccgctctggactgcttgggagagctctgatgatcacacttcacagttaatctgttagctaggaatagctgcaggcctttatgcctccaggagaggctaagtctggctgctgtcagcttctggaacacagaaggtggccacatcacctgattcaggtctgtgagctgatcagcttcacttctgtaagttggcttagctaattgcaacatgttaaagtggctttgactaacatcactatcactagtgacaagtcacagttgacaagcaagggttgtatttggctgactccatttcttccctgccggtcagcaccacacagccgccagcagggcacctcctgttctctctccctttcccgagctctggcataatttctgtctcctctctgtcctcctaggattcctgtaaaggctttgccaaacccctcactgttgtagaagtctgtgagtcattacacatagcactggactagggagaagtgaaggggttgaattaaaaattaaatctgcgggggccgggcgcggtggctcacgcctgtaatcccagcactttgggaggacgaggcgggtggatcacgaggtcaggagatcgagaccatcctggctaacacggtgaaaccccgtctctactaaaaatacaaaaaaattagccaggcgtggtggtgggcgcctgtagtcccagctacttaggagggtgaggcaggagaatggcatgaacccaggaggcggagcttgcagtgagctgagatcatgccactgcactccagcctgggcaacagagcgagactctgtctcaaaaaaaaaaattttaaatctgctacttactcaccttgtgtccccgaggcagttatttgctttctctagtttcagtttcttcatctatagaatgaatgtattaacacctgctcttaatctatagaatgaatgtattaacacctgctctcacatagggttacataagatatatcccataaataaacaaaaaatgtataagacacagatggtccctgacttacaatggttcaactgaaaatggtatgactttaagatggtgcaaaggagatatgaatttactagaaactgtactttggctacccgtcaaccattctttttttttttttttttttttactttcagtccagtattcaataaattacatgagatatcctactttttattattaaataggctttatcttagataattttgccccactgtagactaatgtgagtgttctgagtacactgaaggtaggctaggctaagctatgatgtttgttggttagacatattaaatgcactttcaatctctgattatttttaccttaagatgggtttattgaaatgtaaccccatagtaagttcaggagcacctgtacttgtgatatgctaggctctagtcaaagatactatttccttcaagaagtagatatgtaaacagataagcactgtccagtggtgagtgcaatgagagaattgtcctggggcacagaggcaggagcctcagaaaagctttcctggaggaaaggcactggagccccgttcggaagaggggagggctgcagctggcccaactgtgggccttcactgagagcccttcgggtctgggctctctgctgcatccaggccttgcatggtgaggctgtgcatggtcccacctctctgatgtacagcaggttgtcctccctccatggggccagccatctcctagagaggatgacaggcccaggaacttcaagtccttcctcatctgcactattctccgaaatcccagttaagtaaaaaatcccacagaaatttaaaatgtcaaaatagtgtccagtcctaacaaaatcccaggcagaggagataacagggaaaatgtccagaagtgagaacagtggaggtgagccaaggcagttccccttgtgtgcagtttgggagcttaaagcaggggccaggagcctgctgggggtgggcctgcacgtgcaggtcagggctgcactcctctccacggtgccggccactcttggttgcattgcctggaggacagcaagactctccactggtttcgtcacacagtttagagaaactattcagccttgcctctaaaaccaagcctgtgacaatctgtacatgaactggactgaaacttacctcctcactcactagaaaagggtgtgctaaatcactgacaagataaacaaggtaagaaaatgagcaaagctaattgctgatatcaatcaagagaattttgtgcttctggaaaacctggatcacttggccctttaacaaatccttactgaaggtcagctctttaccaggtgtaagccagcctggatacagcaggaaataggatccagtccctgccccgagagccgccctctagcgggagctgcaggagggacagtaactgcaacacctgagagtggcaagccactggggagggaggagcttagggagggaaaagaggagtggtttctgggaagagttctcctagcaccactgggcaaagcaagttaaattttcttcccctggctattagtttaataattattcaatgtacagagcatttaaagaataatgcaatgaatgctgtatacccgtcattaagatttgacagttgttgcagtggctcacacctgtaatcccagcactttgggaggatgaggcgggcagatctattgaggtcaggagttcgaaaacagcctggccaacatggtgaaacccggtctgtactaaaaatacaaaaattaggtcgggcgcggtgactcacgcctgtaatcccagcactttgggaggccgaggtgggctgatcacgaggtcaggagatcgagaccatcctggctaacacggtgaaaccccgtctctactaaaaatacaaaaattagtcgggcgtggtggcgggtgcctgtagtcccagctactcgggaggctgagaaaggagaatggcctgaacctgggaggtggagcttgcagtgagccgagtttgcgccactgcactccagcctgggtgacagagcgagactccatctcaacaacaacaacaacaacaacaacaacaaaatacaaaaattagcagggcatggtggcaggtgcctgtaatcccagctactagggaggctgaggcaggagaattgcttgaacctgggaggcggaggttgcagtgagctgaaatcatgtcactgcactccagcctgggcaataagagcgaaactcagtctcaaaacacaaacaaaacaaaaagatttggcagtcgttagtattttggcacatttgtgtactcttgctttctgtatatacatacgtactttcccctgaactagttagaagtaatttgcagcattgtgacacctcacccctaagaaaaggggtgttctcttatataaccaccttaaccttagtaggtattatgcctgtaagaacattccataatatcacctagcatatagttcacattaacatcacagaaattcttccccaaatgtttgtataataatgtgttttgtataataattattagtcaaggttctgttaactttcactcatttcatttgtttccgatttttaatttattttaattagaaatgattactctagtatgataatccacctgccccaggtttgtttggtttgcttttagagttcagactgttataaaatgtcctcaattttggatttgtctgtttcctaatgcatagagtcgggttcaacctttttaatacagtgcctcacaggtgctactgtgtattttcttttgttgcatattaggaggcacatgccagcctgtcccgccgccagtggtattagcttggacccttggtccctttgttaaggggtgactgccgtttgttttattgaaagtgtgcattttcttctttgtgtaataataacactataaggagacattttaagactgtgtgaatgtttcattctctaataactttcacccaaaatttttagcaaatattaaatggtccttttctgactcaattaattacatgaggagtttcaaaatggtgactttctaactctagcctttcttttaaattttgtagctgctattctcttgtaaaaaaaaaaagcattttcctcttttacatttttaacagcttggtcttcaagaagtttaaggctctgacttatttggaagccttaactcatagaaatgtgtgtgtaccacacagagggagagagggagaataaaagactgtgccgtgggtcacacacaggccaaccatcggttccactaagatggtccttcccgctctcctcatccctctctagcttcctcactgtttctcaagtgtagtcaaaatcttctaccctgggcctttgtgcttcctttttccttgaccctccttccccagagagctgcatgactcactttattctgttctctgctcagatgtcatctttccagaagatttactgatcacaccatacatcattccctctcctttattctctgtctctttctctctcttgcttaattccctgactcccatcaatgcctgccatgtgaacttcatggaaacaggcctttgtcccattggttctacacctagaccagggtctggcccatagtagatgctcagtgaatatgtgttaaatgcagaaaggaacacatgtatttatggatgttcaataaggttctaaatgagaccaaagaccttcccttgtttctgtgcatagcttcttccagatgaacactgagccactcaagctctgtgcagaaatgggtggttattctcccgtcagccaggaacagcatgttggcatctgactggtgcagtcagcagccgctcacttcctgcccaattattaaagccggcaaagcctcaggattgctcccctccacctactgtgacatgattttgggtgaataaaaacaaatcagaattcatcaactgtgaacaaaattgtcaactgtgaactgtcaacagtctggcttaaaaaatggatgataggttgatgaaatacagtggagaaagcaatttgaataaaatgttaaaaataatacccaaagcatgagaggcaaagcagagtgtggtgtggtagagaaatgtactcggttgagacctgtgtgagcaatgaaccagaaagaggttgttagctgtgctttacaaatcataaaagagaaagatttactgaccatttacggaaaatattcactcattccaaccaatgtattagagtgttatgcaaaatggaaggaaagattggttgggaaatctgctagcacatttatttttaagtaggtcaacattttgagtgtatctgcctgttcatgtcgtcattggctcttgcttctttttctgtctgcagtgataagggcaggcaggcatctctgttttagcaggtcgagggtctagaatccccaggggtttgtatttataataatatgttgtgtatgagtatgggttctagtataatgtttaaaagtccttaacttatttcctagtttctcaactctcctcctttagagagttagagttaattatttatttgactgcttcatcataaaatcaatataaaggtttgaatttttaatatttcctcttttctgggcatgcgtcacaactgatacaacttggccaagttctttaggtccaactgctcatatcctgaggctgctgtttcatagtttttgttttgtttctttccagcagagctgagccatcttggcacaaagatctgtgctttataaacctaagacaaagtgtcttcattccttagagtctctctctttttaaaaaatctggatggaaagaatattaatttgttagtgctactgtaacaaagcgccactaactgggtgcttcaacaacagagatttatagtctttacatagagtccttagtgtaaagctggaatggtgatcaggttttggcttctgtatctgttcttccctagaaagaacctgggagaagggaggagggaggatgagggaaagtgattgggagggtaacttcaagggtgagaattagagaagtgttgtgggaagagaacatctgtgggaggccgtgggctcaggagcagagcttcacactctcaacccttcctggagggctctacccgcacttgctcatggagttttctgggaggtgtggttctagcttcgttgtcacctccataggagcctataaacattgttttatattttatcataaagtctttgatacataaaaatgtatatattatttatagaagttgtcaagcttagtaacagaacaaaagcctcagaatctaatgcttactttataaaataaaacatcatcaatgtttgtgacgcttcccttgggctcctgtctgaccagtcctgctgccttccctggggaggtgacccctatcttcctggtatttgtcatggtcccctcccctgccagtttttaaaggagcttttaccacatgtatctgtatctctaaatagcctgttttaagctttataaaaaatggaattatggctggatatgatggctcttgcctgtaattctagcatttcgggaggctggggtgggaggatggcttgagcccaggagtttgagaccagcctgggcaatgtagtgagaccctatctctacaaaacatgtctgtagtcccagctactcatgaggctgaggcaggagaattgcttgagctcaggagttcaagactgcagtgagctatgattatgccactgcactctagccagggtgacagagtgagaccctgtctctttaaaaaaaaaaaaaaaaaagaaattggccttttgagctacatatatgaaatgccacatattgtcctgaaaggtaaaaaaacagatctgtgcccttgaacttggattttcactgatacagataagagataagtactgttttctctggtggtgtctttctgtagctagggaggagactgagctgcctgcagagatggccaccagggctggacaggagaggggatgctgcaggccagccgagaaagtggattccaggaattacagtccacagggcccacagtcatggcaaggccacccagagaggctcatactccaatgataggctggggtgagcaggcaggctgaggggcagagtactcaatgtggagctcaaagaggcgtctcagggagtagacatgggtaaaggatggtttaggatgaatgtggtgagtactgagctccagcacttccttccttgtgcaggcagattggtaagcacccagggactggaacagaggtccagagcagcaaagtgaattgtggctcccttctttctgcctttgtcattcagcagctgtttattgaacacctactctatgccagggctctgtgtatgtcatatcatgccagggataaaacactaactaaaaccttttcttgctgttaaggccttcatggtctagcaggaaggaagtcattctgttggtcagcttttgctaagttatgctgtaataacaaataatccccaaacatcattggcttattatgataaaccctatttccgtgttcacattgtgcgttagctgtggctctgttcagaacacttcagctctgttccatgttctctgccttctgggtcctgggcagaagggaacagcccttatctggcacatcattttcatggtagagaagagcaacagaggtgatgaaaccagtgattcttgacatgtctgctcaaacctggcttgcatccctcctactaaccaccactggttggagtgagcatgtggctagacctggtgggaaagttgaccctcctacagggaggtgctgctgcaagacatggggcctggagcagaagtgtggattcctctctcagagagagaagagaatgggttggagagggggagtctcacagtctatcacagatacaatcgggcagtaacagcaatagcatgataaggctttatgataaacaaaggtaataattttgactttatgaaacaaatggacacataaaaatatatttgttcccctaaattagctttaaggattcttttaataagccagagaaccactagtctgaaacagaggattgttccagagaactagcccagaagaggcggaggaggcagcccggtcatggcagctgtgtccggctctgggcacgtgcacacacgctgtgctgaatgaaaggaagctcctcatgctagtgacctgcctgctgccttcccggcgttccactcggctcaccttcagtccacgtgctctctgtagcacatcccatacctgaggtcctctttcgtgccccatccctatggagacatgtgtcctgcctcacctcatagtcacatccacatggctttacaaggacacactcttttttgcttcatcagctcagttgatgtgtgagacgtgggcaatggcttatttttgtgtagcccccacaatgcctgctgccatgctgggcacgtactaggcactgaacaaatatgcacaagaggaagttttgtatcaagagggagccagcattctgtaggtttgctctgttgccctctccctgaatgggcagccggtgactgtatgggtgatcattggagtgacacaggagtgacttcagtacattagaaccaggtttaaagtattctttccctccgtttctaatcggtatagggactgaatagcttgtcctcttacaatgagccagtatttatctgcactcgtgtgtggctttgcaaatgctagtggacttttttcaaaggtatgcatttgtgttttccaagggcaaggactgtatctcctcttttctttcatttaaaagattccccatggcacctgataagagctgcatgcacagtgggtgcttgttaaatttcacctatctcttcttcctttgaacctccaccagatatgcatgtggtcctgggcccgtgggtctttgcagaggactgattacacaccggtcttgatcttgagaaatttacagacaaaaaaggagtaaagtctcagacaacacagatccaggccaatagcaaagttgcataattagccacacacagttcagtatgggatgtctgtattccgaagccccatatacacagtgttgtggaatgcattaagtgcttggccctgagctttgtgatcttttgcaagttacttaacctgagtcttaatttcctcttccataatgcaagaataatacaaatgctgataattgttgtggtcttttgcacctattaataacattcctctctcctgcctgtgttctgagaattcattgagactttagagtaaagagctgacagaaaaatgactaaaatattaccattgctactgataaagggttgacaagaggatgtggattatgggcttctaatatttaatcctagaattaggtaaacatttccacggagtcacaagctagttagaccacaggcatcctctgatgggggaagacccgtgtaaacttaggttttggacaacggaagcaagagcattcattcttcattgctcccaaggggaaggggctgagcctcagattaccatacagacttactaaagggattgttactcttccctcccaggaagagcatgtgagcaggctgagagggaccaggagtggtattccagcggtgttacctccacacgggaggagtgtggagaagatgcctcaaagtgaatggagggggttcctggaccagataggactctacagatgttaagtttcatattaataattttattttagaaatagtgacagtagggtttaccatcattaaaggaagtcttctagggcttccacagtgtttttagaagttatcctctgcatttggtaaaatataaaaggccatttcttatttagtattctgtaattgagacctctacctgaggtcgacctctccctgctttgtctttgcttttgtgaagcaaagggcactgctgtttcttaggaggcggggtaggggtctgttatggctgcattcttaagacctgttgtgtctctcttttgcagtgcaaattggagttccatgcttgttctactggcaaaagcctcgccaccctctgtgatgggccctgtccctgtctcccagagcctgagccaccaaagcacaaggcagaaaggagtggtgagtgagggtttccttcagagaattcgtgggcaggaatggggggtcacagagggttgatgtggccgagctctgtcccaggcactaggaacaaactggagaaatgagcagacatgacaggtaagtactccagatttagggaccctaaaccgaattgccttcaactaccattaaaaagatgaacaagagcctttgaaaataatcctgttagaccaggatatccactaggttcttttagaggtcatattcgctatggtgtgggaggagctgtttttcagcatctaagaccggacctgccctggggtacatcttagtctttcttgaactctaatcttttgaatcctttgaacttctcaaggccaaatatcaaaacagagactgcagagatgtcacaacagtggagagagttctcccctaaagtatttctttattaatatattctgcttgtaaggcagcacagagccaggggacagatgaaagagaatacctccctaagggtaactgtttctcttctgtggctgagagggccaggaaagcttgggctcatttggatgttttcatgatggagaaagtaatgttgtcccactggtctcagcctctttttgagccttccttggtgagacccaagatagacgtttgaatttgccttctgtggaattcagctttctcagctgtagttggcttttcttggaaattgttgcatttctctctctctctctctctctctgtgtgtgtgtgtgtgtgtgtgtgtatgcttatgttttaaaatctaggagtgatttgtaatggagtggaatgaatggggtatgagcgtttatctatctggctctttataagctatgttgtcttttccagggcaaataaatgatgaagatttcaaatctaaatgtgatcatggtgacttcaggaatattgtgtttaaaggctctttaggaggtttaagtcaggatgtggaaggacgttgtaaaccatgaaacactgtgattacaaataatctccagttattattcttgatttctaaaaagctaatctcattgcagttaggcctgattcatttagttataaatgcagtaagaaaagttaactaatatacataagcctctttgtagtctggtcagaaaatctaaagccatgtggtgttaagcaactacgtagcccagaaaattaacttctgtctggagatttcttaaaaatcttaggaaatttcagaagcctctcttattctaggtatattgtttattgcttttattctgaggctagacattgccatgttgccagccgggtgtggtggctcacacctgtaatcccagcactttgggagaccaaggtgagtggatagctggaggtcaggagttcaaggccagcctggccaacatgacgaaaacccatctctaccaaaaatacaaaaatcagtcaggtgtggtggctggtgcctgtaatcccagctactcagggggctgaggcaggagaattgcttgaactcgggaggtggaggttgcagtgagtcaagattgcgccactgtacttcaacctgagcaatagagtgagactccatctcaaaaataaaaaataaaataaagtcattgccactattttgcctgtagcatctacaaatgagggtgaatgcatctctccttaagagagatggcctccaagtctgccattataaggtaacagtccaggtttctgggagggcctcatgattttgcaaataaaaaacaacccttgtttcttaatgatgggcttcatatttaagcagatgagactgacactccaggtgtggccttgactgtgccatctatttgttcaattatttacgagtaaaaatgagaacagattcttactgaatctatacaagtaaccccattgccattaaaagtaaagagactcagacaaagtgttgttcctgaattctgaaaggccagtgagaacaagattaccatttaaaaatctttcatttcaaaatgtttacaaaagcacagactactaagttaatggtgagagatcaggaaaaaacagaaaacactctgtgatatcagaaaatagaacattaaaaataataccaacaatattataaaacaactaaaattctatttcctcatcagttcctttagtccaatataattatttttgctccaccagatcttgggtcaacagtttgcttttatgaacaccctttggaaattatctaagaaataccaccttggaagcctgcaccaatgagtctgttaattgaagtgtcagtagttcaaacttggtacgattctttccatgaggttctaagactgtccttcattgttaaagacctcatttctaggctctgacttacagcaaagttttcacgtaagcatgaggggaagcagaagctacctgttggtggtagttaatttatgacagtaccaacagtatcctaatgcaggagaaaataatcacctattagggtacatgtttaactatctaatatggattctttttttttttttttttgagatgaaatctcgctctgtcacccgtgctggagtgcagtggtgcgatctcagctcactgcaacctctgcctcctgggttcaagcaattcccctgcctcatcctccctagtagctgggagtagaggcgtgcaccaccacgcctagctgatttttgtatttttagtagagacaaggtttcgccatgttgctcaggctggtcttgaactcctggcctcaagcagtcctcctgcctcggcctcccaaagtgctgggattacagatgtgagctactaggcctggccaaactatctaatatggatttgatcagtgttttcctacaggataagaacacatttgggggagtgagggcattgataaatccccagagtcattctttgaaatgaaacatttaagtaataatgctttacctggacaaaattgagcaagagaaggctgaccttttcctttgatttgacacctctttccatgcagctctcacaataatttatgacaggcaacagggctgacctgaggtggtggcagttcaaatgaagaggagggcatgggtacaagggagaggtcagaggtgaaataaaaggaaactttgagttggcaacttagccgtggacagagggaggaagaagagctgagcatgcagtccacctccccttacctgtcagcagccccttccagaagctgcaggcagtgggcatggtgtccacaggcagtcctggcctctgagacacattgtggctctggaccgtaggaggagctgtcttatttctgtgcctattgcagaaatgagagtttacagtcttataaatgcaggtctgtaaaaactgtggcaatacacacacgcacacacacgcacacatacacacacacaaactgttgtggtgatattttattttcaaccttacctctattctgaacctcatttctgaggtgaaacataaagtcactcccaggtcaattctgttaatgcagggctgtacctgaattccaggaagtagaagtgggctgagggcttatgagctacagtattggtgggaggcttttcctggtgttttctttttctttgggatccatccccttggatggagttcttaacatcttcagttaggccagtggtgttcattctcactgcatctaccgagagacctgtactcaccttgtccactaaggtcacggtgaatcctctttcttctctgttagatttctctgggtttactagccctctcagcttcttcttggccctgttcaggggcacagaaaacttgaggaggcccttccgtggttttctggcatcaaaaaagactgtagtgaggttgctatcccaagccttctcttcatggatctgttctgttagaccaagatatgcattaggttcttttagaggtgcctggcaaccgtttctattcaatgcagagtacagttttatgaggcttgcctcaaattggctttcaagctggtagccaaacacaggtcctctttactgccagggctccccacctgtctcaggtttcagaatcacctcttcccaacctagggtccagaactgggtgagagatggggagaattatggagaggagaatccaacactcacctgcatggtcttctccttttcagaggtttacttcttatagccccactttggtcaacactggatgtcagtgtggaggatgtatgaggcaggtctaactcactctcttccaatctcctagtgtgctctgcttctctgcctcttccagcctttggtcttttgagttataacatcttcagctctggcaaatcagaactctcttgtctcacctttaagtttcatctgttttttttttttttcagaagtcaaagccaagatttttttgttgttgttgttctctttgtttatctggcatctctcctttggcatgtcccctgaagagatggtggaacctgaagagatggtggaaggtgggaccatcttttaaaatttccgaatatttctttcttttttttttttttttttgagatggagtctcgctctgtcgcccaggccggactgcggactgcagtggcgcaatctcggctcactgcaagctccgcttcccgggttcacgccattctcctgcctcagcctcccgagtagctgggactacaggcgcccgccaccgcgcccggctaattttttgtatttttagtagagacgggtttcaccttgttagccaggatggtctcgatctcctgacctcatgatccacccgcctcggcctcccaaagtgctgggattacaggcgtgagccaccgcgcccggccctgaatatttcttactacatctctaaattacctcctgacaagggcaggtgacttcattgccttatctctctcatctccataaagccagtccagcctcaagagtatgaagcaatggttatccacaaaaacaaaaaacaaataaaggaaaacacagttaaaaagagggagatgaaattgaaatctctgcgttgggctggggttctgtgcatttttttgtttttttcaggaaaggtctctcccagtttctcttggtattttttaggacccaacagtcagccccgtcagcaaagtcactttttagctctgacctgaattcttcagctccagggcattgctgatgctttttcttcagtactcggtgaaaaccatgaggaaagtctgaggtgctgtctttattattattattattattattattattattatttataatgcttgaaaatctcaagaggaaatagaggtctctcaaaagtggaggctttaaggtagatttttcagctagcccatactccaccccttctgaacctgagcatctgcctgctctgccctacttcccctgtttcagggacataaaccactcccttctggcctgagcatagcagccccattccctgcacctcatctgagaagggatttggagcttccccttccccgaggtgaggacttggcagggttgtaggattttggatcaagaagagtctcacttatccacaccatgttgaggagtcttctctgttcctccaaggtgccacagctttccccatacggaccaggggaaggccaaatgggtggggcctcagatctcctccagagtgactccattcttacacgttaccacttagattacacctgtgggaagagtttgaccaccactggtctttattcagtccacattcaccagaagagaaccctggaggctcactgagaaaagatccttgcgtgccatcagctgacagctcacctgaccctgggtctagtgagtttgttcctatcacgtgtgggtacatcctcagtcacagtcagcagcatctttagcctgaagatggtggcaggtctgtatgatgggagttaaatttaatttctcctgggtctgaagtcacttgcccacatcttacagtattaaccatcaggcagagaatgtcaccacactcccaaaccagcaaggtttagaatggcatcctacagacgccctcccacccgccccctccactctatctctagaagaggaaacagaacattctccaaggacagctccttcttttcttctgttggcacagattagatcagaagggatgtggctccagcctaagaaattatggagaaggctgtggaactgttacccacttcctggcctgacatgagctgggaggtaggagcaggatgggggcaggtttggtgcaggaggggaggaaagagaactgcaagtttttccaacagggcatgctaaagaggaaataacaacttccctccagctgagctatttagaacagtagaaaaatagtctacagtgattttcttttctcaaacggtgttttcaacccgagggctagattctgggggaaactgtcttgggttgacagacggttgtccaattccattacttatcacaagtggagctggaaacgtggataaaagggaacaggaggcggtgaaaaagggaatggggtaaggagttcctcctagctgtaatgtctcaatggaaaattcctgaaagaatcctgctgcagaggctcctagaaaaatagagatttatctttgcatccaggaaagaacatttttgtttaatgcccgttgtgtaagagagtgaaagccttgggcttgcaaacttggaatttaaaagcagtttatactaacctttcgatacatattcagcttcattcacttgtcattcagtactacatttgggtcagaaattaagcacataaaggaatattttttagggccttgttattctaaatgtcatgaccttaaaaaaatgcttgagaattaaattggcaactgcatcaaagaagaaaaattcatttgtcaggactctgaggtaactgctgactttgactttgatctcagattcttcctcttctgtgagttcaactctgggaaagtgcaccacaggttttcctggtcctctgaagtctatttgatagcaagtgattggggaaagctaaaggtgaacagagaaagaaggataagctgaggcaaagggtagctgcggtcggaaccagagttcagtgaacgggatagaggtttgtgctagaaattaatggctttgatagtttgcccagacagcactcttatcctgcacttactgtttttttttttatgtacaaaattaacatacattctttttattttaacttttagttttaggggtataagtgcaggttggttctatagataaattgcatgtcatgagggtttggtgtacagattatttcatttcccagataataagcatacccaatcggtaattttttgatcctcaccctcctcccacactcaaccctcaggtaggccctggtatctagtgttcccttctttgtgtccatgtatactcagtgtttagctcccatttataagtaggatgatgcagtgtttggttttctgttcttgcatgagtttgcttaggataatggcctccagctccatccatgttgctgcaaaggatatgatctcactcttttttatggctatgtagtattctatggtacatgtgtaccacattttatttatgcagtttaccactgatgggcttttaggttgattgcatgtctttgctattgtgaatagtgctgtgatgaacagacgtatgcaggtgtctttatggtagaacaatttatattcctttgggtaaatacccaataatgggattgttgggtcaaatggtagttctcttttaaatcctttgagaaattgccaaatagctttccacagtggctgaactaatttacagtcccatcagcagtatataagtgttcccttttctctgcagccttgccagcatctgttattttttgactttttaataatagccattctgaatcatgtgagatgctatttcattgtcgttttgatatgtttctctaatgattagtgatgttgagcattttttcatatgcttgttggccatgtatatgttttcttttgaaaaatgttcatgtcccttgcccactttttaagggagttgtttgttttttacttgttaatttaagttccttatagattctggctatcagacctttgtcagatgcataatttgcaaatattttctcccattctgtgggttgtgtatttactctgttgatgtctatttactctcttttgctatgcagaagctctttagtttaatgaggtcccatttgtcaatttttgtttttgttgcaattgcttttggcatctttgtcataaaatctttgccaaggtctatgtctagaatggcatttcctaggttttcttgaagaggttttatagttttaggtttcgcatttaagtctttaatccatcatcccagtttggttatttatttattttgcatttaccttcaattatttctatatgcatataataattttttaactttactcatccataattgggattatattctacataatgttttgcaccctgccttttatatatcatacatatattttcacgtaagtacatgtagacctatctagatatgtgtgtatttgcctgtctgtcaccagctaacctgcctgcttccttgaactccagacttaaatatgtaatgactacttagcatttccacttggatgcccctaggcatatcaagcttaatgtctaaaatcaaactttaagacatccttgtcttgtattataatagcttcctaattgatctcctggtccttaccttcttttttttgcacatggtagtccagctgattctgtaaaatgtaaatcagattatgtagtcccctgttcaagacactccatcttgttaagattaagaggaaaagttaaagtcctttcagtgacctgcaaggcaacatgctctggtcctctgttacgtgtctgtccccatcttttgctgctctgatccttgtgtgctcagctccaggcacacaggtctccctggagctcctcaaatgtgcccttctcaccactgcctcagggcttggcactgaccatctcctaggccaggaccctcttccccagacatccatggggccactccgtcaaccacctctttaaatctttgcacaaatgtcaccttctcaggaaaccttcccctgaacttcctacctaccttctcctatttatttttctctgtatcatttatcaccttctaatatattcgtttgcttaccttttttctttattgtctatcttgcccaagtagaatggaagttacaggaagtctttttgtctagattttcaatgactgacaaatgtcaaatgaatctacttcattctttttaaaatgttgtccattgtacatatgtaccataatatacaatgtttaaaatagtaaacagatgatttatggcacaagatagtctgtataaagtgcttaatttgtgaattgtgctaagcactttatacatatgtttaatccccctaacagccaaataatgttatctcctttgctggtgagaaaatttgagatttggatctgttcagtaccttgcctaaggccacacagataatagatgacagaacagggatctgaaaccttttctggaacttgtgctcttacccttacattatactgtgttcttaacctaaattcaatgtccactgaaaggtcgggcttcctttgaaaaaagaaaaagtgcacaccccactcttccacacgtgtccatccgcacactttaagctaaattttcccatgctttcggtactcagagaatatagccctttacgagatcacagccttcactgatgggatttttccaaagtgaaagaattaatgtcctcacacattttctcctgtctttttctcaagcaggcttagctctctgaagtttatcaaaacactggcatgggctcattgttcatcaccatattatgcttttctgatagctacaagtttccaacctagctcttaaagataaaaattcatttgtaatctgtcctgaggttgactgttcttccattgccctgctatccattactgtgaaaagaaaagacagcattacaataaaaaataaattgaaattatcaccagacgaaagtaagtggcttccaccccacaaagcagactgcttagtgaaatgttggtaggcctctttcctagatccaagtggtgtattgggagctaggcctttgacagggcagagagcaaagaaaggtgtggccccagtccaacaggtgtagtaagaatcaaatgagctcaattttagctataaaagtagagttacagttcacaaaatataacttttatcatcattgtcatatcaatgatgatgattctctgtttgaaaacccaaagtggcaattacatataaagcaggaatgtcactttgataatttaacttgaggaatatataatgatgccagataaagctcagaatcaatagttggttgaatgtatagtgatagatgttcaggttggttagagctgcaaccaaaacacaaacaaccatccagctctctccttattctgaagagactgaagtaaaagagggaactgagatgtgttcaaatcacaaagaagtaattagagtaaaaccctgtgttcctctcctagtcccagaaaggtcacctctaaggccctcctgcttgaaaagagtgagcagcgctctatggcaagagaaaagacctgctgacacagtaggagatctggttatgaatcttattatttcaaggcttagaatgagcttaaagcagcaataacttcagaacaatttaggggaagtactgggagggtgaggaacagtgatattagtagagaggagaccatagggtctgcataatgtgggaagccctgctttcaagtttcccagtgatgtagtagcaggtcttcctggaggcaggtccttcatacttgcgtaaattttaccatgtagaaggatcttgaatgaacaaacctagcccacctgttgcatagcagtcggtggtggggggagggtctcaagaaggtagttacatgtgcctgtctcctctcatcctagccaagagagcaccaatttactctggactccttggccttactatgtttggtccaagcttgagtctgctaaatggctgttgccaccaagtcatgtgtggaagtggagtgaggctgtcaaccaagtagatctcctgggcttcactcaaaaacagatgtgatcatagccgcagccaagaaatactccggaaaatgacttgcaaaaaaactaagttaaaaaaaaaaataaaagtccttttttatgagggctactaatcctatggaactacccctgagaagtattacagaggctgaagaggcctaaatctctctccctgtatctcccaaaatcttagaatttaggatattatatcctaagccaggccagtcaccagggagtttttgcactccaggacagtagcttggagtggacggcatcatgtccccttactcccttgacctcatctaaatccagatctcagtctatgacctggttcctttagggtaggatactgctggttctccccagcctccaggatctggcatctgtacttcccatagaccccctgtcccccacccccacatggttgtgtagctgcaacagcgtcccctcacctgccagacttctgtctgtgattcacacctgccagcctgtcttgtccaccagggtcttcagctccagcttttcctacagcctgttggctgctgtgtgtaccatgcccaggacagtgcatggcacagattagactgacttcaatcatttgtggaatgaagtaactgaggaaatgtatagggtcttactgttttccaggcacatttatgtacttgagattttggtggtcccagcccttggaaaagttgggttttgtaggtgacttaggtcccgaagtcaaagaggcaggttcctccacctgaaggtacttgtctatgtacttccctacatgggtcattctggggcacgacctcaggctaacaggtaactgctgtgcgtttctggctcctctgcactgggaagatgccatcatcagaagcaagctcaggcagtctgttctttccctacagcccacctccctgactagagagaagggctcaaggtgtctcaagaagcaagtatttttgccttgatgacagaggtgtagcatcctgtggtatagaacattctgtttagtgtttccttgtgcccttgtgagaacacagaacatttatagccagaggagggagtatctggagattacaagcatttgttctcttttgagtgaagagctcctgttataagaattatacatagttctgtgttgtgaaatagttggcttaatatctgattaccattgtgcccaagaggaaacttgcctacttggggaaagcatagtgagttaaaataacacagatctgttacttcgtgtaccttgcttctcaaggcctctgagctatatttaaaatttaaagcttaaaacaatacccccagagggttttttttgccctaaaattgaggacagtgactgggtctgttggtaatgagtaatgtatcttcatccattcagctgtccatccagccagctggcatttattaagtgcctgttctgtgcccaggtcctatgctctttctcccttaagtgggataacaagaactcttaggaccagatacaaccacagtgtgttgctcatgggtctgcatatggagctcacttatgtctcagggtaataattgtgtcgagctgagctgttttccatgtctttatagagcagagtttataagtccaggactccaataatttttattgctgagtacgtttctataattttgacatactaccattgtggtctctgtggtcagaagaactaggtttcatttcatgtggttgaaacaaggaaacctatttaaaaatacaagtgattctattacattttggaccttatgtactggcactgtaaactcattagattgtgaccttctagaaagcagggattatgtctaatttatctttatatccccagcataggatctgtcgaatgtatggtcaccactaagtgtaaatattaatttgtaatatgtctgttacaaatttaattagagcaatacttaataaatatctagattaaattagtgcatttctgcttcctattatgagttgtttattctccatatggcagagactgacctccttcttggtttactccaagacttctgattcaagttggcctctaaattctctgggtggctttccttgttggcgttctgtgataaccacactgactcctttgtcctctggggccctgtgcacctggtttgttgcctccttgtcccatgagcagcagctaagggacatcacagtgtggcctctgccacatgtgctgcctttgctttctgtcttgtacaggaagactcctgtccccctgaccttccatgagcctaactctgtatcttcaaggtttaggcaaacttgtttgcacttgtctattatttgccttcaattatatatgataagacttgttgagagggagtcttatacactagaaaatgcattgcctgtggaaccaggcaattgtaaagttgaattctagccccagaacttgctagctatgtggctttgggcaagctacttaacttctctgagtctcagttttctcatctgtaaaaacagatagataggcctatcttgtgaggttattagaatgaaacaaattaattgagataattatgaaagtggctggttctaaaaggtgctcaatgtataccattttccttccttttttaatgtgtgtgcatgcgcatgcacacacacatacacacagacatggatctgctctttgtacaatttgacaataccagccttccaaaagaccttggaattctagaattagtcttgtagacatgtagcagagacactgttagttgtctagcccatagccatttgattctggttttctttgaggaagaataagctcacctgcattcttattttcccagtctcttccagctgaggatgtggccctgtgattcagttctggcccgtgaaatgcaagtaaagtcttctagagatttctaagaaagcttttgcttttataacaaacagggacaggcagagcttgtgctgtgttttatccttgcagaggtgtgagtggagctgcagcagcccttttgtagccacaagatgccaagcctaaagcttcagacccaccccccacccattaaggatgactgagccgaagcccagaaagaacctgggtccccagtggcactatggagtagctgaagcaacattgtgactgcctttcttctgatttcttgtgtcacaaagtaaatccccatgaatttatgccactgttaactaagctttcttatttgcagctaaacacattttctaatggagatagagcacatcctttttacaggcaatattggtgcaaggtcagaagttgtcaaggtgccaggaacaatggcaacttggtatctaggggaggaggagaccagagatggcctcaggagccatctctggtttactccaagacttctgatgcaagttggcctctacactctctgggtggctttccttattggctttctgtgataaccacaactgactactttgccctctggcgccctgtgcaccttggtttgttgcctccttgtccctgagcagcagctaagggacatcacagtgtggctcagaggtcatgcttcttgtctcaggagcatgtagttcctagaattagctaaagggcttagaatgtcctggagagggaatatttgacctatggttataaatcatgtgttcctcatgccttggaaagacagaaaagggagcagaaaaattgtcccatggtaccagccaacaaggcatgctggaccagaacaccctgtgcctgcagttggacagaagaaaccacctaactggagaagacagttatgtgatggaagacaggagacataggctcatttaaaatgagcattaaaaaaaaataggagttatacatatttattatagaacacttaaaaatactgcaaaatacaaagaataaatttttaaaattacccagcctcccaaactgaatataataaaatactatttaaaaatctttactattagcttaataatacttaattatattcccatatcatcaattattcttttaaaaactgatttttaatggctgcatggtgttcaattctataaaagtactataattattgtaactagtcctttattattgaacatttagcttctctaatttatagttataaatactgattttatgaacaacaatgtatattaattttgcacacaccttaattattttcataggatgcatttttagaagtagaatttctgggtaaaatggcttgtatactgtaagtcttctgttacatactagcagaaattctttcagaaaagatgtgccacaagtgatgtgtaggaatgcctagtcagaggaccactgtcatttttggatactataatttttaaaagaatttttccactttgtgggttaagaaaaaggtagctttcttagcagggatttagtttaacggtaggtgactgacactcctgaacctaaataacagtggtttaaacaaaagagggtgtatttcattttcacataaaatgagtcaagtggtaggaagtccagggcttgtatgaggcaacctcaatcataagggaaccaggctccactcttgttgctcaaacaagtctgcctcatggtccaagatgtctgctagagctccagccattccagctttagtccagtcagtgggaaaaattgaagagcaaagaagggcacccctttcttttgagcagacctctgtgaatttggatacagttctgcttacatctcaatggccatctcagtctgaatttagtctgagtacagtcacgcatggtcctacctagatgctggggagtacagagttttcaggtcaaaagcagtaagccagcagaaaatcaaggttctcattactaggcagaagaatgggtcttgggagacaattatctgactcctacacattttgatttcttacttctttgatcatactggaggttaaaggtgtgtatgtgtgcgtgtatgctatttgtaattatttttaaaatgccctatatcctttatgatttcccttttaggatgctgattttttttctcaatagtttctcaggttattcttttatatccttaatttgatatgaattcttcatatgtagttcacttttcccccaatatgtcatttgtttttaacagtggtttctgatgaactaagattttgaggtttttatccagtcaggtccatcattctttttgtttagaatttctggcattgatatgtgtttataaatctctgtcttactctgagaccagataaaatttcacctatgtttctattttgttctgtcatggcttgaatttttcatgtttgatgcataaggccagtggcattcaaacaggaagaaatcatttctacagtaagccaatacccaaagctttcaccaggcagcgcccttactctgtaagacatgccctgttttcttttctctgctatcatacctcatgtttgggaaagattttttgaggacccattcgtagattgcaactcgtagttggaaaagtactactaataatcagtctcatactttttggggtataataggaaaactgaaactgtattttgtgtgtgtgttttaaatagccagttcaaaaaatgacttttactcaataattcatttttcacctaacaagttatccgctttttcatattttttcatgggtattcttatctattctctccgacgatattcaaaatcattttgaaaactttaaagaaatgatatttagattggatttacaaagtaattggagaagaattgataactttagagttaagttgttgttccatctggaaatgtggcacacatctctccaagcctccttggaaaacgtctgcagttttctttcagaatacgggagtatttctcattacatttatgactagagagtcaatgtttgagattgctttttgtgaatgaaatctgttttccatttttgttaaaatgactatttctttcaaataggaaatcttgattctgacagtttttagtttatcattttggattttctttagaaaatgatatcatctgcagataatgggcatttttatcttcctctctaaagtaaattttaagaaatagtcatttatcaagatggccgaataggaacagctccggtctacagctcccagcgtgagcgacgcagaagacgggtgatttctgcatttccatctgaggtaccgggttcatctcactagggagtgccagacagtgggcgcaggccagtgggtgcgcgcaccgtgcgcgagccgaagcagggcgaggcattgcctcacctgggaagcccaaggggtcagggagttccctttccgagtcaaagaaaggggtgacggacgcacctggaaaatcgggtcactcccacccgaatattgcgcttttcagaccggcttaaaaaacggcgcaccacgagactatatcccacacctggctcagagggtcctacgcccacggaatctcgctgattgctagcacagcagtctgagatcaaactgcaaggcagcaacgaggctgggggaggggcgcccgccattgcccaggcttgcttaggtaaacaaagcagccgggaagctcgaactgggtggagcccaccacagctcaaggaggcctgcctgcctctgtaggctccacctctgggggcagggcacagacaaacaaaaagacagcagtaacctctgcagacttaagtgtccctgtctgacagctttgaagagagcagtggttctcccagcacgcagctggagatctgagaacgggcagactgcctcctcaagtgggtccctgacccctgacccccgagcagcctaactgggaggcaccccccagcaggggcacactgacacctcacacggcagggtattccaacagacctgcagctgagggtcctgtctgttagaaggaaaactaacaaccagaaaggacatctacaccgaaaacccatctgtacatcaccatcatcaaagaccaaaagtagataaaaccacaaagatggggaaaaaacagaacagaaaaactggaaactctaaaacgcagagcgcctctcctcctccaaaggaacgcagttcctcaccagcaacggaacaaagctggatagagaatgattttgacgagctgagagaagaaggcttcagacgatcaaattactctgagctacgggaggacattcaaaccaaaggcaaagaagttgaaaactttgaaaaaaatttagaagaatgtataactagaataaccaatacagagaagtgcttaaaggagctgatggagctgaaaaccaaggcttgagaactacgtgaagaatgcagaagcctcaggagccgatgcgatcaactggaagaaagggtatcagcaatggaagatgaaatgaatgaaatgaagcgagaagggaagtttagagaaaacagaataaaaagaaatgagcaaagcctccaagaaatatgggactatgtgaaaagaccaaatctacgtctgactggtgtacctgaaagtgatgtggagaatggaaccaagttggaaaacactctgcaggatattatccaggagaactttcccaatctagcaaggcaggccaacgttcagattcaggaaatacagagaacgccacaaagatactcctcgagaagagcaactccaagacacataattgtcagattcaccaaagttgaaacgaaggaaaaaatgttaagggcagccagagagaaaggtcgggttaccctcaaaggaaagcccatcagactaacagcggatctctcggcagaaaccctacaagccagaagagaatgggggccaatattcaacattcttaaagaaaagaattttcaacccagaatttcatatccagccaaactaagcttcataagtgaaggagaaataaaatactttatagacaagcaaatgctgagagattttgtcaccaccaggcctgccctaaaagagctcctgaaggaagcgctaaacatggaaaggaacaaccgataccagccgctgcaaaatcatgccaaaatgtaaagaccatcgagactaggaagaaactgcatcaactaacgagcaaaatcaccagctaacatcataatgacaggatcaaattcacacataacaatattaactttaaatataaatggactaaattctgcaattaaaagacacagactggcaagttggataaagagtcaagacccatcagtgtgctgtattcaggaaacccatctcacgtgcagagacacacataggctcaaaataaaaggatggaggaagatctaccaagcaaatggaaaacaaaaaaaggcaggggttgcaatcctagtctctgataaaacagactttaaaccaacaaagatcaaaagagacaaagaaggccattacataatggtaaagggatcaattcaacaagaggagctaactatcctaaatatttatgcacccaatacaggagcagccagattcataaagcaagtcctgagtgacctacaaagagacttagactcccacacattaataatgggagactttaacaccccactgtcaacattagacagatccatgagacagaaagtcaacaaggatacccaggaattgaactcagctctgcaccaagcggacctaatagacatctacagaactctccaccccaaatcaacagaatatacatttttttcagcaccacaccacacctattccaaaattgaccacatagttggaagtaaagctctcctcagcaaatgtaaaagaacagaaattataacaaactatctctcagaccacagtgcaatcaaactagaactcaggattaagaatctcactcaaagctgctcaactacatggaaactgaacaacctgctcctgaatgactactgggtacataacaaaatgaaggcagaaataaagatgttctttgaaaccaacgagaacaaagacaccacataccagaatctctgggacgcattcaaagcagtgtgtagagggaaatttatagcactaaatgcctacaagagaaagcaggaaagatccaaaattgacaccctaacatcacaattaaaagaactagaaaagcaagagcaaacacattcaaaagctagcagaaggcaagaaataactaaaatcagagcagaactgaaggaaatagagacacaaaaaacccttcaaaaaatcaatgaatccaggagctggttttttgaaaggatcaacaaaattgatagaccgctagcaagactaataaagaaaaaaagagagaagaatcaaatagacacaataaaaaatgataaaggggatatcaccaccgatcccacagaaatacaaactaccatcagagaatactacaaacacctctacgcaaataaactagaaaatctagaagaaatggataaattcctcaacacatacactctcccaagactaaaccaggaagaagttgaatctctgaatagaccaataacaggctctgaaattgtggcaataatcaatagtttaccaaccaaaaagagtccaggaccagatggattcacagccgaattctaccagaggtacaaggaggaactggtaccattccttctgaaactattccaatcaatagaaaaagagggaatcctccctaactcattttatgaggccagcatcattctgataccaaagccaggcagagacacaaccaaaaaagggaattttagaccaatatccttgatgaacattgatgcaaaaatcctcaataaaatactggcaaaccgaatccagcagcacatcaaaaagcttatccaccatgatcaagtgggcttcatccctgggatgcaaggctggttcaatatatgcaaatcaataaatgtaatccagcatataaacagagccaaagacaaaaaccacatgattatctcaatagatgcagaaaaagcctttgacaaaattcaacaacgcttcatgctaaaaactgtcaataaattaggtattgatgggacgtatttcaaaataataagagctatctatgacaaacccacagccaatatcatactgaatgggcaaaaactggaagcattccctttgaaaactggcacaagacagggatgccctctctcaccactcctattcaacatagtgttggaagttctggccagggcaatcaggcaggagaaggaaataaagggtattcaattaggaaaagaggaagtcaaattgtccctgtttgcagacgacatgattgtttatctagaaaaccccattgtctcagcccaaaatctccttaagctgataagcaacttcagcaaagtctcaggatacaaaaccaatgtacaaaaatcacaagcattcttatacaccaataacaggagagccaaatcatgagtgaactcccattcacaattgcttcaaagagaataaaatacttaggaatccaacttacaagggatgtgaaggacctcttcaaggagaactacaaaccactgctcaaggaaataaaagaggacacaaacaaatggaagaacattccatgctcatgggtaggaagaatcaatatcgtgaaaatggccatactgcccaacgtaatttacagattcaatgccatccccatcaagctaccaatgactttcttcacagaattggaaaaaactactttaaagttcatatggaaccaaaaaagagcccgcatcgccaagtcaatcctaagccaaaagaacaaagctggaggcatcacactacctgacttcaaactatactacaaggctacagtaaccaaaacagcatggtactggtaccaaaacagagatatagatcaatggaacagaacagagccctcagaaataatgccgcatatctacaactatctgatctttgacaaacctgagaaaaacaagcaatggggaaaggattccctatttaataaatggtgctgggaaaactggctagccatatgtagaaagctgaaactggatcccttccttacaccttatacaaaaatcaattcaagatggattaaagatttaaacgttagacctaaaaccataaaaaccctagaagaaaacctaggcattaccattcaggacataggcgtgggcaaggacttcatgtccaaaacaccaaaagcaatggcaacgaaagccaaaattgacaaatgggatctaattaaactaaagagcttctgcacagcaaaagaaactaccatcagagtgaacaggcaacctacaacatgggagaaaattttcgcaacctactcatctgacaaagggctaatatccagaatctacaatgaactcaaacaaatttacaagaaaaaaacaaacaaccccatcaaaaagtgggcgaaggacatgaacagacacttctcaaaagaagacatttatgcagccaaaaaacacatgaaaaaatgctcatcatcactggccatcagagaaatgcaaatcaaaaccactatgagatatcatctcacaccagttagaatggcaatcattaaaaagtcaggaaacaacaggtgctggagaggatgtggagaaataggaacacttttacactgttggtgggactgtaaactagttcaaccattgtggaagtcagtgtggcgattcctcagggatctagaactagaaataccatttgacccagccatcccattactgggtatatacctaaaagattataaatcatgctgctataaagacacatgcacacgtatgtttattgcggcattattcacaatagcaaagacttggaaccaacccaaatgtccaacaatgatagactggattaagaaaatgtggcacatatacaccatggaatactatgcagccataaaaaatgatgagttcatgtcctttgtagggacatggatgaaattggaaaccatcattctcagtaaactatcgcaagaacaaaaaaccaaacaccgcatattctcactcataggcgggaattgaacaatgagatcacatggacacaggaaggggaatatcacactctggggactgtggtggggtcgggggaggggggagggatagcattgggagatatacctaatgctagatgacgagttagtgggcgcagcgcaccagcatggcacatgtatacatatgtaactaacctgcacaatgtgcacatgtaccctaaaacttaaagtataataataaaaaaaaaagaaatagtcatttatttatgtctcactgttgctaaacactctgtaccttatgtatgtttccatgtaatagtcctgaaagcccagtgttgggagggactatgatctccatcttaaatacaaaaaaatacgccttttaaaattcaaattcttccatctggcaaatggcagagccaagatttgaactcagattattcttactcttccacctgggcgtttaagtacttcattctattttctatatgtatgttacatttcttttgtgtgtgtgtcttaatgctttggttaaaactttcacgataaagtgaataatactttgctaagaagtccctgctatggtaatttccgatgttgctggggcataaatgggaatcaaggctgtgaaggcctttgcacacaccatccttctaagattggtctggtgaactcctgatgcgtcacttagagacaactctcctcactttcttggcttgatcaattcttggtcattctttatgcttagaacactgtgttccccttctgttcagcaactggtgtccaataaagctctactatatcccaaagtcattaatttaatgttaattttttcacataaactctttattttagaaaatttttagatttatagaaatattgcaaagatagtagagagttcccagataccctgcacccatgtttctctattattgtcttacattggcatggtacatttgtcacaattaacaaatatcaatacattataatcagctaaagtccatgttttaattcatatttccttagcttttacctaatttcgtttttctgttccaggatctcatccaggataccacattgcatttagtcatcaggtcttcttaggctttgctaacattttcctcattttggatgaccttgaaagttctgagtactggtcaggtattttctaaaatgtccctcaattaggatttgttccatgttggtctaatgattagagtagggttatgagttttggggaagaacccccaagatccacagaggaatcagcacaagtgtcattgtcatcctatgaagtcataattacatgcttatctatatgacttatcaccattgatgcaaaccttgatcacctggctgaggtagtgtttgtcaggcttctctactgcaaaggtactcattttaccccatttctacaccatactctttggaagaagttactacgcatagcctacacttaaagagtaggtatttaatgttccatctccttatgtagatgcttcagggtagagtgtctacataaattatttgaaatattttacatgagagatttatctcttttaccccatttatttgtttcttaaagcatgtattaatatttatataatgtggactcatggatatatattttgtgcttgaggttataatccaatactaactattaatccaatactaagattttacatttcaaattgttccagctttggtcatttggcactccttctgttggtcttgtgtccctttgacatacccccactgtggtgtattttatttacctactcttgaacacttctgtaatttctggcagaaataaaatatccaggctcatcttgtgtatttagtatcccagccatagaatcagcaacttccacaaacagacctggttctttttattgtagaatggaattagaaaccaagatcctagcactcattgtgctcactacttcgggaatgttgttgttctgcactctcatttgacagcaagggaatatatatgtgtatactaatccatatgtgtgtgtgcatgtgtgtgtatataaatgtatgtacatacatttataaattattctatatgtatctatattaagctaaatacaagtttatgctaatgtatccaactcattaccatgtcgttatagcttcctccccttgcttatctgtaattctccactccaacagtaggaaacttggctcccaccatccactatccatttacttaattctttaatcccagtatcaaaattattagcctctatttccatgggaaacaactttatcaactagagtagagtgcttatgtataggctgtttgcttataatctccactcatttccaaaactacacaggtcagcacctttataatacattcagattactgtgtcacattctgcattacatcctaggatcccctggcctcctaaatgattttttaaaaatttgcatacattaaggttcactctacgctgtaaagttctgtaggttctcactaattcctaatgtcatgtatctgcccttattgtatcataacaaatagttttattactctaaaaatattctctgtgcttcatcttttcaactactcctttttccctacctcaaaaccctgggaaccactgatctgtttacctgctctacagttttgccttttccagaatgtcatataaatggaactgtgcattacatagcctttttatgctggcttctttcacttgacaatattcatttaagattcatctaggtctttttgtagtttgatagctcatttatttttttatcactgaatagtagtccattgtatggatgtttcatagtttgtttatccattcacatattgaagggcatcttggttgcttccagttttggtgtttatgaataaaggtgatataaacatttgagttcaactttttgtgttaccataatttttcaaatcagttgggtaaatacttaggagtgctgttactaacttgtttataagatatttagttttataagaaatggaaaaactgtcttgcaaagtgactgcagcattttgcatttccagcagcaataaatgaaagtttctgttgctttgcatgattgccagcaattggtattgtgagttgttttggattttagacactataataggtacatggtgatatggtattattgtttgaatttgtatttccctatgaaaaatgatgttcataagcttttcatatggttattttctatcacatatggcaaagtgtttgttcccatgttttgtacacttttaaagttgggttgtttatgttcttgttgaattttaagagcgtttgtattttggatacaagtcttttatcagctatgtgttttgcaaatatttttattgaggttgtggcttgctttttggttctcttaacagtgtcattcacagagtataagtttttaattttaataaagtccaacttatctattttttcttttataggttgtgattttggttcagcaccaaactcaagatcacatagatttttttccccatgttttcttctagatgttttatagtttagtaatttacagttagacctatcatccattttgagttaatttttctgtaaggtagaaggtctctgactaggttcattcttttgcatttgaatatctaattattccagcacagtttattgaaatgactatcctttccttgcttttgtgcctttaaaaaaaatcagttggctatatctcattcctctcttctgttccattaatctgtttattttttttccaccacaaccatgctgcctttattattgtaaccttatagtaagtcgtgaaatctagtaatatgagacttcatactttgtttctcttcttcagtattacaatgctctttttaaaaaaatgtaattaaaaatttttttaaagaaatatgtatggttcctagcctttttgcctgatacatgtacattgtctgggcaatctagtgctggccaagtacacagtaggccctcctttatcacttgctgactgcttagaaggacagtaggaacaatttccttggccagtgagttcagcagatggttgggcatgaccatcttgatgagccattatgcctcatcatctctcatggggtgacagacacttatggttcccaaaagaaaactgattcctagtgctgatgattaatacagagagatgtgaaattgattgtttttaacaacaacaacaaaaaagttttaggatgaactggatctcatagttgaatgggaattagaacatcaaacataccatacagaaacaaaagaagcagtttaagcaacagatttagctaaggcttcagctggtgcagaaacttctctggtcacttctatggtctgtcatatggcaaattgggtattgctaaacgtctcaggcagtatttgtcccttatgtattttgtgggcctgtatttacagtgtttttccacctgtcttcccttgctcccagatatgtttggagattgtctccagcacttatctcttctctgcaaggcctatgcatgctttgtgatgaatttgtagccacagtgcagtgcttgggcgaaaagacatatgcccagtgtggattggcagcagatggtgctcatcagaatgcattgaacagtaatccaagccctcatgaagtgctagcttgctgttaacaccatccttcccacctcttcggattgctgggtgggcccacttcagctggaaactaattcatactgatggtccttttgctccaggctcagagcccagtctctgcgggcatcaccacctagtgggcactgggaagctgctggacacagccagagcagggaagcaagtgcaggaggaacaacaaaggcctaagtgaaaatctggctgtgcatgacagctccgcattaaccttcagagaagctctcctgggaggtaaccttggcagactccagccagcagccggttctgttattattcaaagtataggagcaatgaatgggttgcctgcagggatatttggtcataacctaaccttaggaaagctaccatggagggaagctgttgttcaggtgaagagccaggcacctgtatacctgtgaatacccagcattgctctgggtgcatagaaggttccctttgatggggctgctctgttcttctctttcaggacctgcccaatgtggtggcttagtagaagctaataacagctttgggtttataggctaaatcatacacagggctctgatgccagggctactcctccctctaggccatcattagcaaagcctttcctactgatggtgtgggccctgcccatgggggcgtgggacctgttgcatggatgatctggtttgtaggagagccagagaggtggcaggtagcaggtgaggtagcttgtaatctgaatttgcatcttccaacttgagtcttctgcaaaggtcagcatacagggtggaataatactgaggaaaagtagtaactgaaattcaagtactcaatggatcattagcatgaacatgggcattgaggtcctcaaggatcaagatccataatttattttgtctacacgtctcaagttcacctctgttctcctagggctccgggtataggcagaatgtccccgttgcaacaacaaaaaaaaaaaaaaaaaaaaaaaaaaaagtgtggcaggcagaaaggcagagtgataaagtctttctagattcagcatctactagttaaatcacttttaacaaatcctttacctgttgaattcatgccttcattggaagaatggaaataagaataacaatacctcctcgtggagttgttttgaggttttaatgaaatgatcaaaataaagcacttggaatgggatccagcttataataagtgacattattaccaccaccacgatcatcatcatctacactgttattagcaataggaaggtctgtgtaacaacattctttccaccctctgtcatcagctctctgcattaaataaaagtcagagaaccgtttttgtttcctactatatgccggacatatagtaggacatactgatgaatacagacatgcatacgcagtttctgctctcatagagcttataccttctaggggtgaaacttgataaatttattaaatttcattaataaatataaaaataagcaatgcaatttgtgattattaattgcttagaaaaccaagtaatggcatccatctgatttcaaacagccctgacccataagttctttccttggctcatgtcattgtcaatctgtgacacaaaaaatatatttctataaaaagtaatgagagccagagaggacaggaaagtaaattaaagccactgcaaagctcctcaccaattttttgttgttgttctggcattaagtagttattccctttgcccttccctgccttcttccttttctctcttaaatccctccattccatacctctcttcttcactttcaaaccactcagtcagttgaaaccttggcacttaaaatatttctacaggaggaagaggaaaggggcagaagatgtctactgggatcttcatcccttcccaggcctggttctgggcattgtcaggtacctgctccttacctgccagataccagcatcctgtatgcagggaagcttcactggggtgaaggggtagagggagtgctcagaggtctggtttcccctaagacagagtaatttgacatccagtaaggtctttcatgagtctcagactttggtgacaaaagcatggatctacatagcttcttaaactgtcttgccctctatgtcagcagaggagaggaatcattcagtggcatttctttcttcaatccatgaggcttttgcttcatgttcccccacaacagacttacgggagagacagctccaccctcaggcaagggcatacatctcaacccctcttgcagttaggtagaaaggtctgttgttgttccctaatacctagtttcccaaagggatttttctattctatgacaaatctgatatggcctctgccaccaactcccatttatgtgatcattaaagtatgtaaatgcagctactggctgcattccacccacgtgaatgagaccagcacccctgggtcacctctccctgctcagctgtgccacagcctcaaacatcaggggtaagcaactggagtttctgaaacttcatttctaggtctgttattcccaacgcgtatttatgtatcaggaaacttttttttaggttagcgactcccatgagttcaaggaatacagctcaccccagagaaatctgcaagtgaggctaagggagtatatgtatgctgatcttgctcctccctgatcttagttggagaggacagtggtgattatacactttcttatcctaaaccacttagatgttaggcatttattatagcagctgctgttaccttaacaaaatacaaaatgaattcaaacagtgtttgttgagcacctgctatgagacaagtgttctggaaatttgggagcctaacaaggtggactacagaggaaggtttgctctcatggagctagaattgcagggcagcacttaatccatctatctagtatgtgtggtacacatgtgttctgtccatcataggctaggcacaggggatgagggctacattgttatgtgcctccatttcccagtacctattcccgtctagtaagatctctgtctagcatctagtaagtgcttgaaaatattgttgacgataccatgacttggatcagaggcatctccttctggttcttggggaggcatgggctcctgtctttcttcctaagtaggggagaagggtgccttggattcaggtatacagaatatgccatctgaaattagctttatttttcattgtctcatagaaaaaggagcttaagctctaattgccactatcggagcgagagcacctgctggttctagcactgcctacattagcgtgcagccactctctctctctcccagggctgccgggctggtaatctgagagggaaatgacttctggttggggggtgaatgggactcattgttgctaactgctcaccgtgtctatcactgtctcacctttccttctgaggagagaaatcaatagcactttaaatgtcttgctaagtaagtgtttatgaagcaggttcccaagggcttagcctgggggcagtgctcagggcagcaggaactgcctggagcaggaaaagcctcagaggtggaggggcctccctcccatcacattccggccttaccgtcctgtaaaatgactgcctcagtgcctgggctctttgaactggaaattagtcggcatgcttgtgagggtctgagagaatggcaatcactcattcattcattgatttactcatttattccatgacacaaattctgagccctgtgttcagtgctggacatgccatccctgccctcagcttcctgtttgcagggcagataaacaaacaggttgatagttttatattgtacaacaagaaggaaggaaagtagagagagcttagggaggaggacacaggagcagatgggatcatcagagagggcttcctggatggaagagaagtcttcatatgtcttgccattgactattccttacctgcaaaccttctccaagagctgctgattgttaaagaaaaaaaaaaatgggcaaggcagagaaatccagaactatgtgatcaacctccctgctcagagttactagatggataagggttaattagaaaaataattaatatttgccagagctggtacccagcaggtattagcttctttcctcttcaagaaaacagatgcactaccctttaacccaccatccttgagtgttgcttagtccttttttgctgtcagggacatatgatttcctatgcaagcccagctctctcctgcctcccctgcagttgttctgaggacacctccccttttctgctagtctccctctcctcactctcatccttgtggggagctccatgagggcagctccatctctgcctcaatccctggttaatccccagcatggagcactgggctgacacatagaaggagtctgaacagagagacaatgcaaccctgctcctatcttggcattggtctctcctttccccactgcctttgttcagcttagctaagagagaaggcaagttgagtagtctcctgggcaccgtggggtgaggacttgctagcagacacatgctccccaccacagctccagcttgggttaggcacagtcccagcaaaggctggctatgattcattcttgtgacaagggggagggcatgagcacacagtgacctcaggatcatgcttcttctccaaggagtctcagactggaagccccaccctgagggatggtctggcagacaggccatccttgaagggcagcagccagcagccccaggtgagcattccccctggttatagcttgcatctcctcctctcccttcctaattcaccctcttccagctttgccgtccttctttccatctacccttcctttggaaaaatagccaccttgcagagaggtacagtgtctgtgcctttgccttgcaaatcggagtctctgcccagaaatggcttcctgaaagcagtgaagaccctgtatcttccccaggggttctgtgattcagactgacagctgccatccgctgggggagccgcaggggctgacagccaccactccggtcctgatacggctggctgtgctccttggctgcctgctttctccctctcctccttcaggcagagggagagaaaaaagaagcagcacagacacctgtagaaatagcactaatttggcctgatttaaattcaggtgctaacttgtggcagtcctgtgaatgtcaggctcagggcctgaggagttgcttgtggcctcactcacagggaaggcatgcatctgatggaagaactcagccacagccaaccccagcagtagaacccactctggaggtagccaatgccccctcccacccccaccaaggctgggcaggcctacacctggacccctctgggccgcccgcatgtgcccttttgtgttctccaattttcctcctagacacgctttgtcagttggaaaatgcagctgctgtaatccgtgccactgtccacaccagcctggccccagtgccacatcctagtgccctttctcaactgtggatctgtcatcaccacatggctcctgtttggactgaatatttccttaaccacagcctcatagttcactctggaactccgcacacctaggtttcattcctagttctgctacctcctagcctcaggatggacaaatcatttaacctctctgagacaacccgagttttctgtgctataaaacaggcttattgataatgctgagcccatggagtgtgacaaagccaggagatgatgtctgtgaaatattttatatagggcttggaatacagtgagtgcaccgtcatgccatctgccatcatcacagcaatgggtgcaaggggttctcaccaccaacagctgcctgtagggatttacagctctgcctcggagaatgccatcccttggctcactgtaggggtattatgaggagctgcatgaggtcatcttggtgaagtgtctccagcaactttggcacctggtaggaccccaccaataagtgggtggagatttcccctcggcactgtacatggtactcgcacagcattcttcactctctgttgaaaagcttggtttcatttgtctctctccctaggtcaagggctccttgagggcagggacttactgcatggtagaccctgagcagcctgtcctccagggcaggagagaatgcagcacatggctattggagtccaagtcattcacctgctggttatttgacagggacttcctgagtgcctactcgaggtcagccactgtgctacaaggtagagtgtaatggtaaaaaagaaaagggttctgctctcatggagcttacagtttagtgggagacatggactgtgatgatactattataaaacacagtgtgtgattaggaatatgctaagtgtgttaggagtagccctggtggggagcagtggctcatgcctgtaatctcagcactttgggaggccaagcaagaggatcacttgaagccaggagttcaagaccagcctgggcaacaaagtgagaccctcatctctacaaaaaataaaaaataaatgaaaattaataacaacatagagaagccctgaagaacaagtacaaggtaccatgaaagagaagagtggttgaagttgacctcatttgggtgggagcagggaagaagggcttccattaggaaatgacacctgatctgaggctggaaggatttgtaagtgtgaatgaggtgagggagaggggtagacagagctaccagtggggagaccccttcatgcatttgagtggctttcagatagcgtgcaaggtgagtcccggggacaagggaaggatggcatgaacatgcaggaagagcagtgaggaaacagccctgcatttccttgggggctgggcttcacagacgtggggcatttcaatagaaaggaaaaaaggaataggggtttggtagggaggcaggcttgtcagcaaatgcaaaggcatgcaaattcgaaggcacgtagcatgttcagagaccattgtcctctcctgtggagttcagcccttactgacattgtggctccatagcatccaggcttccatgcttcccacactgcaggctgcagcacaccgggactccagtctcctcttgcagatcgccagctgctccaccctcacccaggccttcggccgccacgagggagttcatctcccctgacccccactgggctctcattcagctgcatcatagccgagctgagctcacttcctgaccctgaagcagccctgccaagtccagacctagacctgcctctctgcccatccccagccatttagcgggcccacttcttcctgatttagctgcactgaggctgtgagggccgagttcttgtgcatctcttcttctcaggaacaggaacagaagaatccctttacacctggtgaaccaccttcctttttcctgttgccccctccttctctgcctgttccatcctcagccttcaagtccattagggtctctcctgtcttgaacacctcgttaccaccatgcttctgagttcatcgtgaagaacataccgactgcctcccttttctcatcacctgcccccaccacagcaaccctgatggctaaatcctcagctactttctctccatagattttggggatgttgaccacctccttccttccgcaaactcttctccttttgccttagctgattgctgggcttcctcacccttggttttctcgtgagtaccgtcattttccacattgcaggagcccacacttctattcacttacgctacctcgtgcctttttctggcaccatcatctctcagcttccccgctgcactgcctgctcacaagctttcttgcctgttcttttctccttcccactcccctgttccccagccccaaattaatcttttaaaagattaatggaatagtcattcttcccttttggtataaccaggctcattctcattgtcctgtgaaaatgattagacttttgcctatgctgttcccaaacctgagaatcctcttttctttgtcaactcatgaagccacgctaacctactgggattcctcctctgggatgagacatgtttatctgtttgtttgtggggaggatctttctcattggtactcccagtgagtcagcaaacgtgtactgagctcctgacatgtagcttgctgttcagaagtttctagtgagtttgaggagatggacagatgtagagaatgccaaaaaagaaatggcattcctggctggggaatatgtatatattatatatttatttttattatatattatatatatatggggaatatatatatatttctttttattatatattatgtatatgcgtgtgtgtatatatacacacacatgcatatatataatatacacacacatatgtatgtatgtgtgtgtatgtatctatattgtaaactcctctttgatagttcacccacaagctagaactgtatgtacaccatacatttgttaatcattcttgccactgtcattttcgccacccacttaattcttgattatgataaaaagagtttttctgagataaagcttaggctttgaggacttggtattaattccctggatggtgtctaccgttaaaaaacagggtctgataattcctgttagttgcacagtgcaggctgtgagtgttttgtatttgttagaaggaatgtgttaaaatggaatatctttgaaacaagacccaaaacatggcccatcttgctgtagttatgccacgtataatttacaaggaagaatgtgctttcataattctgggggaaaacacttacaaaactcatccttactgtacatattataatttttaaaactctttgggaagaattagaattacaaacatatagtagctgctaggttttcccattgggggatatttacatctagagaaatggcataattacatttgctgtttttgaagtccactggattatgttaactcagagaaattcaacatgagagccggtgaattttggaaattgacactggttcagggcagacctaactttagtttaatggaaagaattctgcctttgaaatgaaatgagggacctgggtgtgaggtggtatttaataagtagaaagcatcggatgtattgtttcttctctttccaagtcagggataatgtggggaataaaaagagttaggaaatggtacagagtcccacgcaaatttgagtggttattgttagttttatttgtgagacttaaatgctatttaaaaaaattacaaaatatgtattattgaacatgtgggaaatattaattattttaatgtagagaaaagaaaaatacagaaactatggctttttaaaacaaaacaggaatgattttataggtagtgccttggaacctacttttctgactttaagatatatcacaaactcccctcgaatcagttttttgaggaattgattttaaagggctgcatagcattctgtcataggatgtgtttaactagttgccaggtttaagttgacttttttttgctattcaaaatattttgttagcattattacagataggcgtttgtccacatctttgataggataaatggctaaaatgaaattacacatcaaaagtatagataactttaggtgttttaatccatccatgctaccaacatatctgcccaaaagtgccctaccaactcatactcccatggtctggtcatttgccaacatcttttctaatcctgagttgttagttaaaaagacacagaattttttaagtgtttcttagttgctagacctccccccagaattgattcctattttaatttgtattgctttgattacttgtgaggttgaacattttttcttttttgtttggcaagctgcagtccttcctttgtaaattgccatttgcgtcctttgtacttagaggccttgtttaatacctctgctcttgcatcgaattgccatggcgtagtcactaatggttcattaagctgtgttatgtcctcctggatcagacctttaaaccgctcatttgtccaaaaataaatgtttgttggataaatgctaaatgaatcataaagcagtaacttggatggccgtagggccaagagctaatggctgttatccccaggagtggcaggacattacttcatccatcactctacccggtatatatttttaagtgtgccaggctgtgtattaggctttagttcctgctctcaagaatgctggtctaaagaagagtttataatacagtgtgtgaactcatgaaaggaaatccttttgaacagtagtccaagaggggacatttttgacccacagaaagtgctcatgctttcatgaaatagcagaagcctcccagcccacatgatttctaaggcatgtgtctcttttctccttgcatgcttccttggggaggcaaatttgagcaacaaacagatgatcaaatccagtttgtagtaaacaaaacggaacctcctctagtaccctttcttcttcatattattgttaaatacagaagggatctcactatgttacccaggctggtcatgaactcttggccttaaactatccttctgcctcagccccacaaagggctgggattataggcatgagccaccatacctagccctctagtaccctttctgtagaagctaataaatttggtttcctcttggcttttgccatgaccctagcatgatctctggcttccttgccaaaccaagtttgataatcactgttggagttgcacgtgtgaggactttaaggccaagccgacccagggcctaatcccagctcttccactaaaaagtcttgggtgccttacttaacttctctaggtctcagttccctattatttaaaatggataaataaattgccgcacaagggtttttgtaaggatcagtcaagatgattatttaaattattgttattaaccaagtcatataagtttatcattaaggaagtctagctggttatgacaaaagattgtagaaggtggccttttctttgacatatttattatagcctggatctgtctggatcttagttttacagatctgaaacttgattttagttttacattgagagtggctcagtctctcagggatgaggtcacatgaagcaagttctcaaaagactgttctataaaccaaaaccaagatagcttatcaagtctggacagttgttaaatagatggagaccaaaatactcacatcctgggccagttttactctctgggtatggctctctgagagccagattataattcgtgcttgttaggtgagctgggaattagagcaaggggactcagttgaccataagcaggcagccccccaccaccaccctggctaaaatagcttgatgaccttggctgcttttaggtttagtcttgctcacatgaccatccatggactgaggtcccagccccttgggagaggtcttcaaagggtgcttccagtgcttgcctctcaagctctcattttcttcttggttctataatgaccacttttttcttttttcctatttgacacattgtctggatgtgtcaatgtcttgaaactggcttagttcccaccaagcctcactctcattctggggtcgagtctcggggagagatttcacatgtgttcacttgcccattggttctgtcattcacttctctgaggcagtctcatttccagagagtcctagagtaggtaggtaggaggtttggacctcactgatctctctaccccaggacccatctgtaaacttcctaccttaagcagtgatctggaatatgaagcccacccccagggataacatccccaacaacacatacattctctctcagtgtctctgggatgctggcagcaagctcaaggaactcctgctgctccaagaggccactgaacatattggtaaacatgctcaaagccactggccctgtgttgctgtgctggataatacctttttccagtgaaccttctctgccagatcctgtattctgtcatttagagtctgcaagtggtagtcctatgaattacatttcctctgggacacagcattttgcccagtaagagcctggctgaggtgacttttctactctgtttcatgtggccagagagcatgtgtcctcatactgtaatttctactccttcagcccttcacctgtgtccctggggaagcagcttgcctcccacagaggagattcaccactctgacagctggatgctttggtgtgtcagagtcacctgacttaaagagtggagcacaagaggtgtgggtaccccaaggtggaaaatgccctccctcttagttataccagtttggaggggggatgggagaggttggcttcctgaaatctgaagggcacagcagtttgggggtggtaagtttattctgaccacagagcctcatagacactcactctccctgctgcccaccttatggttcaccccgtggttctcatcagttccttgcccagcaggcttttcagcagtgcagctacaaggtctctactgagatttggcttcctgcctgcttttgtgcaagagagaatgaggggtgcaaaaggggtggtgtgtatgggggcaggaggatggactacagccatactgactgctgataagctctgcaagggggttgatggaagaagcctccccatgcctggagagacctactctgttaaaacacccttttaccacacccttcagttagtctgtatctgctactagctacatatggatattgagtgtttatggctattaaaatgaattaaaattaaataaaactaaaagctcaattccttggtcacactagccgcatttcaagtactcaatagcccacacatgattaatggctgccacatcagacactatgatatagggcatttctatcatcaccaaagttatattggatagcactgctctgggacagggcaggggattactggctctacaaaagaagccactttgggattccattaacactagatttttataagcattgaattcatataaaactgacctaacagcttatgatggctatattatttgtataaattggggcctacttttctctgaaggcactatctgtgtgtcatctctccttccccctaacaaaaaatcaagttcaaaacatggaaagagcttgagaaagtctcaggcctgtgaagcagggtcccagaactctcagtctctcacaggaattcttgccactgtcacctggtcctttaggtgatgtttgtcctctaggtattttgacccaagttcctgatttagtcatcagcagtggagtttttcagaaaataaaacaatcataaaaatacatgagtttaattattttagaatgaagattttattcattcatttaaaggatatttactgaatgactactctgtgccaggattcaggtgaatcagagcctagattcaccagcacctgacacagggcctggaacataatagatattcaataaatatttatcaaacgaatgaataaattactcaccctagaacaagtccaccaagccatccagcctgctgttcctttttgtttcctgtgaatgttgtggaggtccttggcccagcaactcagaccagcacctgggaggcagctttggattgactgtgctccaggcttggttggattcttctggatattgaagccggttctgtattttaatgtggttgtgttagtgttctccagagaaacagaaccaatagagggtgtgtgtgtggacagaaaaagggagagggagagggagagggaaattgtattgaaggaattggctgatgcagttatagcagctggaaagtccaacatctgcagggtgagctggcaggctggagacccagggaagaattgatgctgcacttcaagcccaaagacaatctgctggcagaattccccctctttttcaggggaggtcagtcttttaaagccttcgagtaattggatgaggcccagtgacattatggagagtcatctgctttactcagtctactgacttaaatgttaatctcatctacaaaaataccttcagagaaacatctagaataatgtttgacttaccatctggatactgtggcctagccacattgacacataaaattaactgctctggtattcttgttttacctacccttggtggtgatgagttgcaactgaaggagacccatttcctgaccacactgagccaatgtttttatttgtctggttctttctctagcctggtcctcctccatccctatggagagctagatgacctcaggtatatagaatctcgcctcttgcaggcatgtttctctgtatgccttccttctatttaatgatagttttcatcattcctcaaagccagcctcctcacttgtttgtatgagtccttaagcccaattttccttcgcaatgtattcctgagtggggttaatacctccctagctgccttgactagtttcttctccttcctgcagctagaaggaggctcatgatggactggaaatatcacaggtttggactcagatttagattttaacctcggttttattgctggctgacctctcagaatctcacctatctcatctgtaaaatggtatgctagtttatttcatggtaccctttgtatcacttttcattcagttttagatttttctcctgatctctttgtccttccttgttttgttttgcttttagaaacaggttctgctgtgttagctagatcaagtgatcctcccacctcaaccacttcagctccccggtacctaggactacaggcatgagccactacacccagctgcttctttgtttttgaggacaggaattatgttttatttaccattgtgtaaatagaatagctagaatacagtggatgctcatgaaatatctgtctattaaatgttaaatgaatttattagaagggagtgatatgggcagaggtaatgtatgtagcaggtgcttcaagtgtaggattatttcccactgttgctggcttgctgttaatgtcccatttccaggacttatctcacctgtgatgctgccagtcttttttgaaaaaatttcattgtgctctggcagcatcacaggtgagataaggcctggaaaagggatctaccttaacatgaggtctaccttctttttaagtattcaatacattatcgttgactataattacaatgttgtacaatggatctccagtgcttattcatcttaacttaattgaaacttcatgccctttgattagtaatgccccattttctcttccccctggcaactgctgttccactctttgatgatatccatttgactgacagtttttgatacctcatataagtggaatcatgcagtatgtatccttctgtgactggtttacatcccttcgcataatgtcctcaagattcatccacattgctgcattatgagttttccttctttttaaggctgaataataatccattatatgtacataccacattttatttttccattcatctcttcatgggcatttaggttatttccacatcttggatcttgtgaacagtgctgcagtgaacatgggagtgttgtctctttgagatcctgatttctgttcctttggataaatacccagaagtggaattgctggagcatatagtggatgcctccagtcttaactacatggtagagatgactgacatatcatgagatcagtggatattcaattttttttattttccccttctagctttgtggttcttctactttttttttttttttacatgtcagatggctcccttcctagtaattgctctatacagcaggaaattatttttaatgattgagatgttcaaatgttagagccacagaggggtagatagcagtaagcaggtcattttctcccatgttctgcattattactttaaatatttcaataggtcaaaggttggtgctccttttattctgaaaacctggtgagatgttaattaatcacagcaaagtttaaggatcccagctttacatcagtgttgtatttaacaaaacatgagcagtcagttgtaactaccccccccccttcaaactggtgcaatttagtgcttatggaatttatctgtctggcagatcagcagccgaacataattttaattacacccgtcaccctcggccgcactctctcattctgtgctaaccttatcagagtagcagtacctgtgctgctgggtttgctgttcaaaagccaaagttttcttctgtgtcatttaaggaactgcctagcactagaatttcagagagaagctaccttattaatataaagtaacttaacaggaagtacaagcttctaggttgcatgcctaagaagatcttctgcagacttcctgaaatagcaaaggatgcaagtgttaaagttagcaaaaaaaaaaaaaaaaaatactatattgacacttgctaattagatccaatttcaccatgtagtctgctatggttatgtgaattttactacctttatttgcattgtgctatagaagcagttcttgctaatgatactcaatgtctttggtgggagcagtcttttgaaagagacaaatcagcttggttctccttcatttctgtgagagcataaaggaagggacagaggaagaaaatcacttaggctgacaaagaattggcatttcctctcgtgataattagggtatcgaacatgtctgggcatcgcattgcagatgaaatgatgccttcctcatggcaccttctgtccatcggtagcacaatttgattctcatttcctcatctattcttctagccccagtctggtatataagtcacacttttcatgtcacttttctcggagcatgttttatgtgtttcagattttagaagtacagcaatagttagcctatcacaccctgccttcaaatctgtccctagtgcctgtcaagcaatggctaccagaatgtgtcttcaagatgtcactgtaggggtacccaatcccctagtcaaaacccagtccctactctctactggggagctggttggaagtgaagccagcccttctgtttctattgaggtctatttttcacattaccaaaataagtcactttatccaacttagtgaacaagtgctctcaatgcttactaagaaatttactatatatcaaagttctaagaactatatatgttaattcatttatttgaatcctcttaaaagccctgtaagatagatagtattcttagtcccattcttaagatgaagacattgaggcaaagaaagcatacaagttgtcccaggtaacaaagacagcaagaagcagagccaggatccaaactcaggcagtcagctccagcatttatgcctgtatccactacactgtgctgcctctcttatttgctaggctttgctgcctgggaatcagaaccaagattaaggaataggaaagaaagagcaaactcagagaaaagtgaaactaactggtccctcgtgtgagctgcagacacaattgatgtgttctcagccaatgagcagtggagaattctatctatggcccatataggaatggaagaggtctggaagagaacgctggccacccaaataccagccctaacaacagtaatactaatgtcaatagctgccctttgttgtttactgtatatgatctgactttcatgcaatatatcctatgcttaaaaaaccttgagacatgtaaattgatataaatcgacactttttttcgcttagggaaattgaagctcacagagcttaaccaggcacgcagctacttagtagcagggcttcattgtacatcctgggcgtcttgcatgagtgtaatattctatatcctctttcctctacttgccttaaaggagcttaaaatcatagtttgtttcagttatttcttgccctgtaacaaactgccccgatcttggtgacaagataataacaaattactgatcgtcagtatctatggtggttcttcaggtcaactggggtggtttgcacttggggtctcttatgtggttgcaggcagatagtgcctgggactggagtcgtattaaaagcattcttccatgtttggcattgaaactggctgtcagctagtacatgaattggggctgttggctggaacacccacttgtggtctcttgggcttcctcagaacttggcagctagattcccagggcaagtgtccagagacaggcagagctagcaatgtggtatggaagggagaaggtggggttgaggggaagctctgtcacctttaatgacctaggctggcaagtcatcatgcatcagtccttccatactctgtaggtcggtcacaaagctctgtccaagtaaaaggaggggacagagagatgccatctctctaagcaagtgtgccaaggtcgcattataaagaagagcatattttgaaaatataaactgccacagtttttttccaaaaatttgttttcttttagagctaaaacttctgcatcaagcaaacatttttgtcagcatagatctttctctttaaactcattattgatatcatctcttttctcagtgaaacatatgggtattaaaaaaatcaactgcatcttgagcagtaccaatcaatggaaaatattgtcatcttcttcccaagcaaagcataatttagagtagttccaaggatgttgaacaaccagaataatttgtagaataactgcattccattttggagttttctagttcgcagaaagatgttctctcatggctgccagattattgtgaatacagttaggctcagaactaccttaatgaaacacagctagtatattcatttttaatttgttagaattttatttaatataaaataggtaattttttaaatctatgaaatgtgtgtaagggataaacggtaacaatacaaagaaagaacaccagtaactttattattgccattaatttccaagttaccttgtgtcacctcctaaccccatcctctctcctccttatttcgtgctaactatcatattgacttctgtgtttattgctacattaattttctttatagtttggcacatatttgcatcccttaatgatattttgttcagttttgcttgctttagaatatttttgtagatggaatcatatcgtattcttcactcaatgctgcattcccaaaatttatctatgctgctgcatgtagctaaatttcaatcacatttgctgttatgtagcattcaacattgtaaacaagaacatatacttttgatgggcatttcttttttccagttttccctatcataaacaatgctgatattaacattcttacacttctctgggtgtatgtgtacaaatgattttatgcagggcatatacctaggaatgaaattattgaggaataataaatgcttattttcaactttataagaaatggcaaatagtattccacagtcattgttccactgatgcttctaccatgagtgcatgaaagttctggttatttcacatcctcaccaacacttcttttctatttttttaggttgtttttaacttttgccaacctggtgtgtatgaaataggatcttcgtggttttctttggcatttatgggcatcttttcttatatttattggtcattctggctttctcatttattaagttcctgttcatgtctcttcttgatttttgtattgggttgtcttttaaaaaatttatttatagaattattcttctattctggatactaaccttttttcagttgtgtgttccaaatatcctctcccagtttgtgggctgcttctttttactctttgtagtgtcttttaatacaaagaaattgttaattttataccatccaattttgcagtcttttgggtccttctttaaaaatcctttcctaccttacttgaaaatccttcccgaccttgaagtcataaacatattctattttcttctgaatatcttttatattattaagtgcatacattttagggagactgcatttctggtgatgtgaacctcttattgtgttttgattctgttttcagtagtcttttttgaattttgataattaagaattctgatattaaaagtctgataatatagctactgccactctcttagtatgtacctagaatatctttttaaaattttatccttttatattaaatatttctttatcctttttgtcttggttgtctggtaacagcaatcagatggggtttttttttcattctgttataatttaacctacatagagttatggaaattctactctcttattaatattttctgctttttatctctcctttttttctaattttggattctttttcctatttttttatgctcattagtcttaaagataaccaccctattctattctcttagtttgtaatccagagattttggcatgcatactttacttgtcagagcctaaacttaatcagtatctctgtgttcctcccagacaatacaaggaagaagtttaggatactttagctctaacttatatggcattattgatatgggtttgtgtgttacattttctaacttccaagatattattattttatatagtttatgttttgcttggttttacctacatattttccttttcctttgtctatcattcctttttgcacttcagaagtcctgtctgtgggcacttttcttctgtctgaagtacagtatattttaatggaaattcctgtaatgagggtctgtttgttgcaaaatatctattttttgtttgtctcacactgtcttcattttcctgtcattctaagtaaaatcttggcaaatagcaatcattgaaaattcagaaaagattgaggcacaacgatgatgtttaccgcattgtttatgaaagacaaaaacaaaagcacagtgaaaaacctacatatttgacaataggggagtggttagctatacaaatatgacatcatattttacaaccataaattatgttttaaaaggtaatgtgatagtataggaatacactcacaatacaatcctaagtgaaaaagagcaaggcactaaactgtatgtataacatgatacacacatacccataaacaccttgagataaaactaggaaaagtatagcaaaacgttaaaattatttctcaggtgttgaagtgataggtgatttgattttcatttttatactttttgatattttataaactttctgcacaagcaagtatagcatttataattagaaaccagtaatttattttgtaaatttcccataatcaaaatgattttaaggaagattggattatttacattcacatctgaccccagcagtgtataagtagcagttatatttttaatgtctgccaattttgtaagcatactatagtattttattatttccatttacttttttattactattgaagtgaaacacttttgtgtatgtgtgtgtatttattggctatttgtatttcttctcactctagagcatttgctcgttgcctttgttgatttttcaattacattcttaatggtcttgctattgatttgaaagaactttttatatatgaagaatattgactctgcctttttccaaactgttttccagcttgtcttgtaacatcatttatagtaacttagttatttctttttttaaaattttaaaaatgattcaggtatacattttgaaaaaagagagaggaataattacaggcaaggtaaaatatatactcaaaaaaaatcctaatatgcatttgtataataaggagagaaaaagcaaataaaatacgcctctaagaaggagaggggcagagcattcttctagagtttttaactaatggggggaaggggtgatttgcctcatcagtcattcctctgtggatgtacatatccatactttcgtatcagtatcttcaatggttatcatgtacctcctgagggttataacacttcattgtcactatatgagatacctgagggaggggacaaggtgaggggaaaggaaggcttcagcaaattacaactattaatatatgcagggtaatgatttatacgtattatagtaggaattaacccagtgatggttccacgttgaccagagtcctgaggtttagacctgtgtccacttcttcctccaggtcacctgactggtccccacttagtcatatcttccacagaataaaccccttttctcttctacactagggtttttcaacctgggcactgttgccgttttgggtgggatgatttttctgtgctgggggctgatctgtgcattataagatgttaacaacatccctggcctctacccacaagatgctggtagcactgttccagttatgaaggacaaaagtgtctccacacattaccaaatgtcccctcgggggcaaaactagccctggttgagaaccactgttccaggctgaagctgacacagggcaattaatgctagatgtttccttctaagctttggggacttttagattgaattgtaatttggagaattttctggcttgatttgcttggatgtaattgtggctggttgcccataggctgtcttccacggtgtggggctatagtgagtcttttaatgaacataaacctttcatttttatactcgattttagaattttttaaaatttttcctttatggctttgatatatacagaccccctctttattcatcttttaataattggtactgttaattgtttttagcctaatcctttaatccctgtaaaacttacaatgatgtgttttgtgaggtggagttttaactttttgcaacttttttcttttaaaataacaaatataatgatgccactggttggataattctattatgatgtcctttaagacattcattgtgttattaccttttcagcgtcatatattgttttgtggttctgtctaaagaatcttgcaatattatagtttttaattattagagcaaagaccctacttacatattatttgtttacatatatacatagctaggtgttgagaataatgtaattccaaaattattattcttgttttcttttatgactttttaagtcatttaaatttccccttggaatttggctcagaaaagaagcaagaacaccagcctcagcttcttaattggtagccaatagcaactgtgtatgaagctcctaccacatcaaggtactgccataagagagacagaaatgtaatgctgtctgtagttgccaaagccttgtagggaggcagactcaaatccagaagccacatgtgctgcctcctgtggctgagttgactatttaattcctcgctctgtggtagctgaggtcctcccttcacataagcagcaggcagccttgagagctcctgcctcagcaggtcgtgtgaggccagctagaagaacaggggaggagaactgtgggggccacagcatgctgcagggcctcgagtacttcccagtcagaaggaggagcctcagcgctccagcctccacatgtgcttgagcacataggagtggcccaacacctgtacccaaaacaaagccccattgttcctggtttctcctttactccccactaggttccacttcttggaccacctgcagggccatctcacagcattgtgaacgtgaggccatagtaggctgctgtttttgattgttttgctctcttaaaatacagcaaatagttttggtcctagacagcctcatttgatgcctgggcagcctttctctaccctaactcaaactctaagttgggttgtttgtttccttccggaagtctagaaaaatataccccgtccctgtgataaaaattgtgcaagaactagatgacttcttcatgttttcactgttagacaccagttggtgttaagatgacctgtttgatttttccaagttcttataatctgggttttttagtacaagcctgtttcccacagaaaatttattgtttggtataggatttattttctaggtcttcttatttgggaaatgccatttgaatttcaacttatgaacgtattatctattcagctcctcacttgcaaagagttctaagtacgtaagacagagaatgagtgttctatggatgtccggcttgttaaatacccactttctgctgtgctcgtgcttgcggtattgcatgaccttcatttattctgcctgacaatgtgtgaggtgggaatattatttttaccagtattcacatgagtgaaatctcagagctcacaaggagagcatagcagtttgggagggatgttcatgtttgtaaaggtccagaggtaggaacgtgcgggggtttgttagtggtctgattttgcgatgaaaagcggccttttttccagtggggtattgacaccctgattccatcacccttatctcccctaggccttctccttcttctgcagtgaagttgacctgcctaactctagccatttcagtaggagtatccttcagactccaaatcttggaaccacaatatggaatgatttctctcctcctttcctccacacttctctacgctggctaggttcccttaaaagccatctgtcactgggctcattgtcacgtgcttaggtgctagagccttttaaaatggtatcctgacttgggggatgttaaaagcagtcccattctgtggccacttcctgggatctgctccatgcctccagaggggcaggccacagacatgtctcagaacaaatctgtcaccttgagaggatttgcatgcagaagggcaggatgggatttccccctctgtagtctattacagtctattacatatgcatgtgtgcacacaaacagaccccattttctcccatgctgagaactgtcaaagggtgacaacatccaaagcaggaccttttagggctctgactgtgcttcccagattccttcaggctcctatttggggaaggagaaccttgtgggaaaatgtgccctgaatgtgagtgtgaatgtgaatggtaccagcactagtgtctgaatctctgctttgctatctatctctctgagacagagtcttgctctgtcgtccaggctagagtgcagtggcgcaatctcttctcactgcaagctctgcctcccaggttcatgccattctcctgcctcagcctcccaagtagctgggactacaggtgcccactaccatgcctggctaatttttttttttttttgtatttttagtagagatggggtttcactgtgttagccaggatggtctcgatctcctgacctcgtgatctgcccacctcggcctcccaaagtcctgggattacaggcatgggccaccgtgcctggcctgctctgttctttaaaaagcagaccaattttactttcccaagactactgtgataaccatgctacaaattcttctccacagctacttaagccacctcttggcaaaagtagaaaaatgaggtttcagaattcgcttttacccaaagacactttttgaattagctccagcttaatttcacaggagagaatctatctgttctggagaagtcacctccaaatgggcttgacctttgtctgttcaccctgccaagttttctcagcaagacccccaccgtgtacagaataactgtcagataaatgggtggtttctgctggagtccttggcggttttcacatcattacacaagattaaaaaagcaaaacaaactaaataaaagatattctgaccctctcaggaatttgttcttgtcaggattctaatatcccttgagatagaaaattggattaatgagtcttagctatgtacatattccattatgggtgataagctcaggtatattgacacagaaagtccctcttgtggatagatctgagagacccaagagggtctctctcttcttcctctatcctggatacttacaatctgggcatagcaggcttaactagcttgtaaattatgtctaagggcactttttgaataaaactccaaatcttgatgccgaaagatttccactcttggactagcaaggatatatgtgtgaacctgaatgtctttagaccacacccctacttgggaccacatggccaaggaaaatggactcagtgagtgtcttaggccatttttgcattgctgtaaagaaatacctctgagactgggtaatttataaggaaagaggttgagttggctcacgattctgcaggctgaacaggaagcatagtgctggcaagtgcttctggggagacctcagaaagcattttactcatgaaggaaggtgaagtgggatcaagcatatcccatggcaaaaacagaacaaagcaagagaagtgggggcatagggggaggaagaagagaggtgccacacacttttaaatgaccagatcttgcaagaagtcaatatcatgaagacagcaccaagccatgagggatccacctccatgatccaaacacctcccagcagaccccattgtcagcactggggattgcaattcaacatagatttgggcaaggacaaatatccaaactatatcaacaaggaaggagatagtcagagccatctttactaccccgatgcgcccccactgtctccactacctgcagatctctgctgacccggctcccaaggcaagctcttaaaaaaaactgtaactcctgtttataacactcttagcaatattagcagtagatgcagtgaaaaagagaagtgtctcatatttcacaaagtattttgactggaatttatgtctacagatccaggtatcccatgtctagagggagtacaaatatttctgcttcatttagttaaattctgaaagtatttatgggggatgcagagaggaaaaattcattagttttacaggtgttagagaatgagaatttctggagggagaggttggcattcggactacacatagatcatagatatgaataaaaaatgttctctaggcaaatgattcccagactgggttcctcagagctgcaagataccaattatatactgcacataaaaaatgttgtgtggtcatataaattggggaacctccaggttaagcaaatttaaataaactctctttaacacgaggctgcagtccaagtcaacaaagaaagtttgccaagtgaatgttatcatgaaagacttttcaggaaatatccacaaactcaagactctgagatagtctgttctgatctccagcaatcttttctgagtctcatcggagtgtttttgtcttataccacatacattcaagttcttaggccaaaaaacaaaacaaaacaaaacaaaacctaaaaagaaatcacaaaatgatggatacaatgttaattgtagaaaattagaaaacatctataggcaataggagaaaaagaaccatgctcttctcatgtcagagaccactgttaaccttttattatataccttcccctgtctctctctctgtgtctctctttctccctccaactcactccacacatccacattattcatttcatgttacaaaagtggggtcaaatcatagatgcttttgtaagctgctttttttcacttaatgtatcataaacattttccatgtcataatattcttctttggcaaatttttaatgccttcgcagttttccaacgtatttgtgaaccacaacttaacccctaatattagacattatttctaggttattttttctatgataagccttatagttgtaagagtacaacatcatctttgcacccacctgtgctttttcgacttaagtattacagaaaatctaacaggtcataattttcagtgtttgcccctcatcttgaggcagaaccctaattagaattagctcttggaccatcagaaacatgcctctaattattagattaactattatagaaccttctggctgagagtttgggacctggaatcagacagccttggggcaaactttgaccctattatatatttcactggttatgtcacttccccaagcctcagtctccacagctgtaaaatgggaatgataaatagtgcctgcctcaaagagttgtgagaattaatgaatctatcacttggaattgcatgtgtgtgtgtgtgggaggatggcagggagaagaaagggaagaattatgtaccagagaccaacataacctctgcatgcccaaagtgcttctttctccagctcgtcctcattttctggcaattagaacctctttttaaatggtgagaatgcaggatacaacaggacagacatgactgtggccatgacctgaatgtgactcccagttctgccacttattagctccttgacttagacatgttttgtaacttcttcaggttcacagtctggaaaaaggatatgaattaaaatcctcgcctcacagaacgttcgtgtgctgagtcaatgagatcacatttgggtgtagagtgcctgtcctacaacaagcagtcagtggcagctggataaaagtcacttgaaataataatttcagtggattttctccaggattaaatgaaaaaagaaataaatgaaggcaaagtgctaacatgggtattggcaagagtaggtgtttaatatatggcaactctcgggactcctggtgttgatgttgatgaacatgacaagttgaactgcactggtgccacttggacccttgcagtcaactgttggcagtttgagcactgcaagctagtggaccccttaggtgcagcacctgcagacaaatgaaccatcttgactttgggctacaaattggaaactacttacacccaagtactctaatttgacttgtccaggagttctaaagtccataacagtggcttataaggttgctcttctggggtgatatttttaattacattatcagtgcaatttattgctgatgtggtagatgggactgaggcaaaaggacctggtggagaatggaaaaggtatgtaataaatttcagggatgttttaaccattgcaatcctttgtgaacacaaggcatgtctagaattctgtctctgggcttagggagaaaaacatgctgggaaattgtggaaagcatgaagagtcacagtggaattgagtctgaaacatacaacctcattacaccatgaattcaatctcaaggcacgttatggggtataattcctgggagtccttagagatgccgtaataccacctaaaattaaccctgttcaaattcttgtctatgcctgtgctccacaccattattttccattcatatctgagctcaactattctcacaaaccagtaattctgtattcctttcagaatgactcaattgcactaaagtttctttggaaggtacctttgttttcttcaatgctctgaagtgcgaagtctatataatttgctaaatgcatcatgtttacatatgcataagccagttacctccaaatcaccatctcctgcctgcgctattggctggatgcttaaagaaaatgaagcttaattttctgtaagcagcgttccatggttttcaaataagcttgtggagacacagataaactaaattacttagtggtaactatccagacaggaatgagaagccagtgcaaaacaagctaggtgtacaatcgttctagcatccctcaatacaatatgcgaagaaacatgaaaatgacattccagggacctcaggctgctaccaggctaagctaaggtctgaggtgttatcagggtgggatagcaacaatctataaacccagagacccaatttcggcatgtggtaggtacctggtaattcctgttctcaggcaagggatgttggcgtgatatctgtggtagaagaattaggccatatttttcataaattagtcagcatgggtgaagttaagagcacagatttgagttattttgtcctggtgtcaaatgttcactttggcctttatgtgtgtgctggtgagggaactggaggctggagtgagcaagccccctagcctgtttagggaccttggtattctcaggtatgtagtagagatgatagtgtcaccctcccaggacatcctgaggcttcactgagacaatatgtgtctttttatctgtgctacatcatagtgtcccacacacatgcatttctccctgcccctcccttcctcgcaagtccattttctgtttggctggaagttatccctctccatggtggctctatctctccacaacatcctcaaacgtacatgctggccatgacctgtttggcatgtttattcttggtgctgttatggtaattggagcagcgttttcacttaagtattcacattcttccctttgcacctcctgtaaacatatattgatgccgacttttggccaggcactctgcagggaactcgggcgagtatagatgtgactactgcagaattcttactgcatctgacctcagagtccaaaagagacagcaggttgtgatatggcatggaaaagtagaactgcatgaatagggccctggggacaccccaaggagggggaggtagactcttcttggatgggtgttgggagaagattccccaggtgaacacatatttgaagcaaaccttgattcttcaggaaggaggattctgagagagagagggtctgtgtcttccttgttaaaattccaccaactcagtggagggaaagcattctccttttacaaattaggagaggggagaccaagcaccaggcaagggctatgtcttaatcatctttgtatcccccagagtgtctgatttagggagtgctggaattgaatttagacctgcccaaggtcacagggcagaatggagaacagcacacagattgtgttgattaaaaaatcctgcatttaggaattattttctcccttttggtttaaaagaaaaatgttagtgtgtagcatgagaacagatggattggtgcaaactgtcttgggttatagctaacaagtctcttatgttcatatcactcaagctttctcccacctcagggctactaccctgcactgcctttgctcactcatttatatgtatttatattgtgtatgcttgaagaggctcttgatgcacatagaaacaaatgcaaatacagattatctctctaccttttaacacatatatagtatagaatatacactattctgcactttcatttgacctctcttggagatctttgcatctcatatgagtagctttatagtttttccattggtggatatactataattgatttaaccatggacatttgaatgtttccagccttttgctatttcaaataatgctgttatagatagccttatacatgctacttcaaatgtatttatatgcttatctgtaggtgttagtcccaaagtgaaattttggggtcaaaatatctagcaacctctctgaatcactttgccattgttatatttcttgtaaaaatcaatatggagttaggcttctctttgtgacctggtctgaaaataaaatcttattcttttgagaggtgaattttaactcatttagacttatcgaagtaaaaagttatgtttagtactatcatctctgttatttttccatattttcctttacgttttttaatattgtgtggcagggcatgtgtgtgtatcattcttctgatattcaggaatgttctcacttaaaacagtgataaaattaatatgattcttctctctcttcccttctcccccagtttagcctccccttcatttctcctgacacttgatcatagttgatacaattatcctcttagggtttaatctttgttcagtgaaatatgttcaatattatattactcagcttttaattctgtcatctgactccaactattatgtttaaggccatcagtaaacttgttgtactttgcatcttcttcctcccttcccctctttgttgttgtttgtatcatttcttcattgacagggtatgtagcatttgccttcttatctgtcactccagtcaccacagttgtctacaattctctagtatttcctttggaagggctcatgagaacagtagttcctggttaactgtatagaactggtttcctgaagtatttattattgatagcacagtttgatgtaaaatccttggttcaactttcttttcttggctgttttaaggatattgttgtattgacttcctcttttgaatattgccgtgctgaaatctgagggcagacttattccttttacctctcctaagttacttgggtatcttttctgctactgtgttgattgtgtgtgtgtgtgtgtgtgtgtgtgtgtgtgtgtatttattattatactttaagttctgggatacatatgcagaacatgcagttttgtcacacaggtatacatgtgccatggtggtttgctgcacccatcaacctgtcgtctacattaggtatttctcctaatgctattcttccccttgccccccaccccccgacaggccccagtgtgtgattttgccctccctgtgcccatacgttctcgtttttcaactcccacttatgagtgagaacatacggtgtttggttttctgttcctgtgttagtttgctgagaatgatggtttccagcttcatccatgtccctgcaaaggacgtgaactcatcctttttttatggctgcatagtattctgtggtgtatatgagccacattttcttttccagtctatcattgatgggcatttgggttggttccaagtctttgctattgtgaatagtgccacaataagcatacgtgtgcctgtgtctttatagtagaatgatttataatcctttgggtatatactcagtaatgagattgctgggtcaaatggtatttctagttctaaatccttgaggaatcgccacattgtcttctacaatcattgaattaatttacactcccacccacagtgtaaaagtgttcctatttctccacatcctctccagcatcttttgtttcctgactttttaatgagcgccattctaactggcctgagatggtatctcattgtggttttgatttgcatttctctaatgaccagtgatgatgagcttttttcatatgttgcttggcgacataaatgtcttcctttgaaaactgtctgttcatatcctttgccaactttttaatggggttgtttttttctcataaatttaagtttcttgtagttgctggatattagccctttgtcagattgatgattgcaaaaattttctcccattctgtagatttcctgttcactctgatgataggttttttttttctttgctgagcagaagctctttagtttaattacatcccatttgtcaattttggcttttgttgcaattgcttttggtgttttagtcatgaagtctttgcctatgcctatgtcctgaatggtattgcctaggttttattctagggtttttatggttttaggtcttatgtttaaatctttaattcatttcgagttaatttttgtatgaggtgtaaggaaggggtccagtttcagttttctgcatatggctagccagttttcccaacaccatttattaaatagggaatcctttccccactgcttgtttttggtggttcaacatatgcaaatcaataaacataatccatcacataaacagaaccagtgacaaaaaccacgatttctcaatagacgccaaaaaggccttcggcaaaattcaacaatgcttcatgctaaaagcactcaataaactaggtattgatggaacatatctcaaaataataagaggtatttatgacaatcccacagcaaatatcatactgaatgggcaaagctggaagcattccctttgaaaactggcacaagacaaggatgccctatctcaccactactattcaacatagtattggaaattctggccagggcaattaggcaagagaaagaaataaaaggtattcaaataggaagagaagaagtcaaattatctctgtttgtagatgacatgactgcatatttagaaaaccccatcatctcagccccaaaactccttaagctgataagcaacttcagcaaagtctcaggatacaaaatcaatgtgcaaaaatcacaagcattcatatacaccaataatagagaaccaaatcatgagcaaactcccattcacaattgctacaaagagaataaaatacctaggaatacaacttataagggatgtgaaggatctcttcaaggagaactataaaccactgctcaaggaaataagagaggacacaaacaaatgggaaaacattccatgctcatggataggaagaatcagtatggtgaaaatggccataccgcccaaagtaatttatagattcaatgctattcccatcaagctatcattgactttcttcacagaattagaaaaaactactttaaatttcatatggtaccaaaaaagagcccgtatagccaagacaatcctaagcaaaaagaacgaagctgggagcatcatgctacctgacttcaaactatactacaaggcttcagtaaccaaaacagcatgttactggtaccagaacagacatgtagaccaatggaacagaacagaggcttcagaaataacaccacacatctacaaccatctgatctttgacaaaccagatatttctttacttttaaaacccagtaactttatttaggtagatcttagtattgaccgttctcggtccctttttcctagcttatgctgtgccttttaaacatgtaaattccacccttatttctggagtggtttaatgaattgtattttaaattatgtcatgttccattgttgtcttttgtttcttcagaggcttcagttatccatatatagggtttcctttgtctcttctctatagctatatgttactctgtaaccttctgtaattccttctttatttcctcttcatgttgttcactcttctcatttctggcatccttctctcttgtatttttccccttgtgctgttctcccttgtgcttctccactttggcttcattttcccctgggttctaaatgcttccataccatttcctcattgactccttatctctcccctgagttcttgaatactgctttgttgtctttctttacaaaggtgattgtttcattttaatccatggttttatacttggtctacatgttcgtcttttccatctttctgctaagtgttctgtggtaagttttgctcttttcctttttttttcaaaacctagaacatagatgcaatgctgctcttttgtaactcactttaaaaatcaacttgccagcccctttaaaaaaaaaagctattattggaataagttagatgttactggcctacctattcaaaaggaagccttgtggatggaaggggaagaaccaggctatctttatagattcacactccaaaggcacttgcttcagggatttaccagtgacagatggcctcctataaaaatggctcctctgtatggtcctatcttttctgtttctatgaaacagatcaggtctaagagggtttctcttatcagctgtgctcactctgtctctaattttcttgccagacccaagtggtactttatggcaagcctcttgcctacaagaagaataattttgtagatgctctctgagatctgctgcctctaggccattttgctcttttcttccttcccttattttactttcctgtgcagcttctgtttaatctgtgcactctcccttcttccagatcccttagttcttgctgaacaagaagtctatcacttcagaaggagctctttgcctgtaggaagtctatttttgctgggtcattgtgtttttattggtccacctggaccttttaacttccatctgggtggcttctgttgtactgttcaagcctggggatatatctcctagttttactgaaaataaaatttaggttttttttcctgggtacattgttgtttatatatgacattcaggaggggaagagagaaattactagctatgtcatgctgtgttgttagatactggatctctaaataggaaatgtagatcaaatatagcagttttactagaaatagagataataataatagcaaacattttatcactgtgccagtcacacgatcctctctgagcccagaggaggtcacttgaggcttgaatgccagctacttttcatgccaagtcactatacctaatcatgccctcaggagaaggggagatgattgagagacttgcatgacctgaagagtgagaagagtagtaagtcgtacacccaagcaagcaggatttggaatagcctaaaacacctttatggtttcaggaggcagtttgtctctagaccctcatttatctatcttcctccttcatcagcttgttcactggaagcatgataatgcaggtgtcctgctgcatctggtccaggcatctccaggattattctgttctggcctcaattccaagtgggaattttcaactccagctcgatgtccaccatcttaccttagactctggcacccctggagatgctgctggacctttgttgcaagaaagagtcaatgctaccacccttccatcaacccatatccccatggcaccatccactctaaaccagggcaatggtggagtagtggggggaattaaaaggagctcatggttctctgcattcattttaagtctatgcctgatcctccccatgtaatctgtgaatgaaagtgtaccagtgttctcctcccactcccaaataaaagagccattcccaggttctggacacctcctaagcttcctatcaccttcaggatctgatctcaaatcccaggcttggtcctccaccaattctttgtggctttctgctccattaaataacaatttaagtttacctcatgtttaagtgtaaaaacatacatgcatattttgatgcttctgggatggaaaaaatatagaaattaaaattgttcaataatacctagatttggatgttgaatctgagcaggtcaaactggacacaaattgctcattagaaatagagacttgtacataccctaaaaagacatcttctgtcaacaacctcttacagatataaaagttcatatattggccctggaacaagcggtgctacctttgtcagaagtcatcccttgagatgtatatatgcatatatattatgtaatatagtggaatagattaaacagatatgcagaacaaatatacatatttatacaacttatgatttatttatttatgagacagagtctcattctgtcacccaggctggagtgcagtggtgcctccttggctcactgcaaccttcacctcccaggttcaagtgattctcctgcctcagcctcctgagtagctgggattacaggcgtgtgccaccatgcccggctaattttttgtattttgagacagtttcaccgtgttgaccaggctaatatgaactcctggcctcaggtgatccaccctcctgggccttctaaagtgctgggactacaggcatgagccactgcacctggccccaacttatgattttatatacatttatgatttagaaatggtatatataatttgagcagagcattaaaaataaatcactttattcaaagtgggctcctcattatttctaaggcctgcctagaatgtctctaagtcctccctgcgtatgagcctcagttcaattcttgcctcctccaggaagccttcactgactgctgttggccagttgagctcatacattaacaaaaggcaaaatgactctcagacactcagtctggctctccacagtgggatggcccatgaaggaattaggcattatcacctagcccctttcccaggactctgtccttccccttcccccatggctctctcagtagtccaggttgagcctgttttacaccctcatctcagagcatttgccattgctgattttaggtgagaacagcagttgtcatttctgcagcttagtctttattagttgagggcctaaaaagtctggttggccatgaaatccttcagtaaaactgctgggtatgatgctgctaatcgatttcaagtctcccatgtagggaaatgctgacccactggctagggagcacagctaaagccagacttggcattttaaaccaatattttgcatatccaataattttttttttttttggccccagagtgtgaaagtggctgtggattttatcagaagctttaaaagcttatttcatctagctaacttccctgatctagattattcagggagaaaaaaaaaataagcgttactccactaatgcacatttacagatgttattatgcaagttctaaatgtttctttttccagatgaaagattatcattagaatcaagggaaacattaaagtctcctcaaatcagcttacctagaatagtcttaatgggtttaatagggaaatttatccatctttgcttgtagattgtaccattaattagtataactcatcttattccaagtttaatgtcagtattttaaactcttccaaagattgctttttaaagactttattagcaagttcctgaataatggcacctaattcctttgctcatgcctgtttttacataaaatgacgcattctctaaggataagagaacacgcatatatattgatgttttaggcagtgaaaagtaaaagctggaattacatataatgcaatttaatttgagcaggcataacctggctcaaagatctctgttagatgatctccaattagaaaggcaattcaccttgtatatgttttttaaatcccttcagtaagctcctattgtgttttctattacaaaactgcttatggcaaggagcttattatctattagcctctcaagggtaagtgctcccagcccctgaagctccttggaagagaagaaatagtggctgcctgtcagtatttgaaagcaaaatcctcaccacaaacattattcccattttacagatgaaaaagcaggggatcagagaagagcaagggcttgcgtgaagagcaacaacttgtacactgagggttgtgagagctggaagtctgagggagtgtgggtcccaaccttgcactcaagtgcatggtctgtatcttgtggaggaggtattttcttggggagaatggggttgtcatagatgagcagatgagtgaaactctagttgagagagctgggcttgaattcagttttgccgtttaccatccgtaggacctgggagatatcatccaccttctctgaaaagcaatagaagagattcctatcttgctggatggcttcctgtggtcatttcctgtgaaaacatcacatgcatgaccttgattcctatacttttctatttggtggatcaccatgctgctctgtgtccacaaacacaaatcagatcacagccgacagctactgagtgtggcctggtgctaccacatggcaagcctggagctgagtgcttaagtgcattctattatagtttcattctcctcgtggtcctaatactagttctgttatcaccttcattctagagatgaggaaactgaagattaaaaagtaacctgtccgtagtctcagcgaggatggcaccactgggatctgcgttcagccctgactccagagcctattttttgtttttattttttatttatttattttttgagacggagtttcactctgtcttctaggctagagtgcagtggcgtgatctcggctcactggaacctcagcctccagagtagctgggattacaggcacatgccaccaagcccagataatttttgtatttttagtagagatggggtttcaccatgttggccaggttagtctcaaactcctgacctcaggtgagttggcctcccaaaatgctgggattacaggcatgagccaccatgcccagcccagagcctactttctctctcctgtttttaagcttttaaggcagaatgactgtgctaagcagaatcaatcttcacctgtttgcattcaagtttattgggttccacattcctaagggaattgtagactcactccttctccacattcatgctcccatggcatgtagcatcctctccttggtgttcctacacatttttccagcactggggcaccttctgtttgcttagatattgaatgacaggagggacatggtccctgttggtgaggaggagcctaccatgctgtactgggagacagacacttgctgctgaaggcttccagcagcctgagaatgccatgatggagggaagagacccaacccaggcaaggcagttcaggaaggcacccttgtgtttgcttgaacccagactctggaaagtgttatttcatctcaactcatcactgctctaaggaaggctcagctggaccttctacaggagctactaattgcaaacactctgagcacgttgatccagggctgctctgattaagtaattattcacaacagcacctaggagggctgaaggagattagtttgaaagaatcagcatcaggtctccatttctgagaggcctccgagcttgctcccaaagagaacttgagtctcgcccaactccttaatcaccttcggaggcactaaagtttaaactaaattctgattgttttcatatttgcttctgctagagccctgagatcgcattggtgaggtttgcctgagagaggggggctggtcctgtgacagaaggggaggagtagggtagggttatttttatcctttggttctttagctgaaagatttcatgcattacaagaatataccagtaattggttccccaacagaggtttacagctatcctgtgatgcctgtgtgtcagatttgccattttcggacatccccaattgggtgttcaaatgtggcttcagttaggatttctaacagagacacgctcactcacacttgctcgccacttcttactctattagatagtaacactatagctttgaataaaggatttctatcctctgtctccctttccattttttatctcatctcccaaatgttttttatcccactgattgtttccttttcttccccgtttttgtcaaatcctcagaaagggcttttcagactgtcattcagcccttgaagtcatcaatgagctgagaccagcgtggaacaccagttatagcctttgggagcatttttcaaagacgcttggatttcctagctcctacctctccactttcaaaaccattacctgttttgaaacttcctcaccagctcttcactagcccctggttttgtctgagggaggacacaggggccagggagaaggggacaatggggtcccggggtacaggcagagccagactactgacactcatctaggtaagaagcaacccttctttcctccaaagactactgcccggggagtctaactgccacataagcaaatactaataacttagagctccccttcccccttacaaccccaccaaggctgcggtaaccctggagcagcttctctgtcctacagtattgacaacaatgcctccttctccctcccatcagctgcgttcctcatgctgcactccaagctatgtttgaacactgtctgcattcaaatccagtctagcttaaagccctataaagctccatgccttgggtggagggggcaaaggtggccaggtggagagcgatcacgttttcttcccagggctatgtactttccatggagactgaacgtgccttatttacacttgctctttgcattttgttcatattttccaaacagaaaggaaaagtccactgggagagcaccaaattacctgggcccttctctgcctgagtgctgtgctttcctgggggagagagctgtctttttccacattttggagtaatgtgcaatggcactatacctttctctaatgaagccccagtggccacacatgtgacacaggcagcaggctgttcgcagttcttccaaaagaccattgttctcacaccaaagctaacaaaggtgagagcctacttgctctccctccatcctatattgctcagctagctacctcacctgcatcattggcagagtttcctacgcaaggcaaggcctgatattttgatttttttcaacccagagtatggaccaagtatattaattgttaggttagtattggctgcccacaagaccaatatatccaggaagtaagtcctgcacgtggggatggcccagcaggatgacagcctgattcaaatcctgtctcttccacttaatagctgtttgacattgggagtctgtgatctattgttcattcatttaaaatatacttagtgataaatatatttttgaacaactactacatagtaccttagagcaagtgctaagaatacgggtgtggggaagtcagaccaatctcccaatcctggaacttatccacagcagacagatattgcaacctgtatttcttggacttctactgacccatgtataaaataaggagagatgttattctttatatcacaagcatctcctcaggcttaaaaaacgcacaacaatacaattctaacatattatgcagacagttgggatatgagaaggggaacataaatttattgagttcctgctatatgccagtagctgtgagctatgttttactaatattgtctcatcttattccatgtagtgatgctatgagctaagctttattacaccattttgcagatggaaaaattgaagtttacaaaaggcagtaaaagggtgattctattcagtcagtaggtgtgtattgagaactttcttcatgccaggaactgactgggttagatgctgggtccccagtgctgggcagagtcagggcatgttttatgttgctatgatctaggggagaaatgggcactgaacgagatgggtgttatgaatgctatcagagaaacaaggcattgggagcatagaaaagagaaatctcaagtttgaggattagggaagtcctctaagaaaatgtcactttaaagccaagatctgatggaggaattggcattagcaaggcagtgggaagaggtgtttgtttcccaatagaagagcatgtcggaggggcagtaaggccagagcgtgaaggttgaggaggagcagatacagaagagagatttggtttttcagtgagtgtgtcctgcaggccatttagctcacattatggagtttagacttaacctacagaataactgggagcctctgaagtgtctcaaacaggagagtgacttgatcaaatgtccgttttggaaatatcactttggctgctggatggagaagggaacatggcgggggagggagggggcaagatgggagaccaattaggagcctgttccagttgtcctggtgggaggtagtggtggcattggagactagaatagaggcagtggagataagaagcagtgaactttttcactgtgaaccaggacaattcccaagtgtttgccctgagaatatatgagtatttgctggtaccattttctgactatgggaagaagcagatatgaggctggggagtggatcccagagacgtggctcacacaccagcccattggagcagatggagattgtgtaaaaatgatacgtcataacgtgtagaaacagtagggtaaatggggaaacatcattgagaagtagtgtgtctggagttggttctttccagtgggctcatggtctcactgacttcaagaatgaagccgtggacctttgcagtgagtgttactgctcttaaagatggcacagacccaaagagtaagaggtagcaagatttattgttaagagcaaaagaacgaagtttccacagtgtggaaggggaaccgagagggttgccgctgctggctggggtggccagcttttattcctttatttgtcccctcccatgttccatttctgtcctatcagagtgtccttttttcaatcctccctgtgattggctacttttaggatcctgccaattggtaattttacagtcctcttgctagctacagagtgctgattggtacatttttacagagcactgattggtgcattttataatcctcttgtaagacagaaaagttctctgagtccccactcgacccaggaagtctagctggcttcacctctcagtaggatgctgagaagaaaactgggagcacaagagcaatgaaaagcaagctgaaaccaggatggagggcgggagggaatgtaattgaaaatgggagaattagagggctagctggcacgtgtccatccaggagggtgaggagagcacaagaaagcaggtcttggtcttcgtgattaatccaaatcctctcccaagaaagcaccgtcttttcctctgaagagtctgatgctggtagcccaagtgccctgctcctctcgccaggacccctctccagaaattgccgggattgccacagggtagaatgccagaatggcaccagaatagtagggggatatatgactatatttttcaccccacgaacattacttttccctaggaatgtactaagtgtgtgggatgtatcctctgggtccccacttctgaaagcttcagtcccctgttcacacctttattgggggcgatgatgagcaccttaaaaggcaggcacttttctcccatcaccagcctgtgtgttgtggctagaataccaaatttgaacaaatagccctctgcaggctgttgcctttgattatttccttctttgggatgtatcaagctccaggcaacctgtgcctgactttcttctcatacagaccattcggttgaagaccttgtgagtgaacagggcccagtaactgagagcctcctctttccatttcgggtttctgatctctctcgacccacaccagtggctccctgctagtggacttgtccctgagtgacagattcattctttcaggatttcagtgcctgatccgatcagacatccaagacttgtgtactttggggagcctgtggaaaatctagcagtcttgtaaagatacagattacctgcacatctgtcagggtttagttaaacacgactgactaattcatcttgaagcatgagatttcctctgcatgttgacttggcaattttctctgttcagagaacatttagaatagatggtgcgcatggcaatagagaaaaaatagaggctattagtttcccattttcaaatgtgaaattgactacggaatgcacaacctattttcctcagaaaaacaggccacattctctcctgcttagagcagggcagtgtcagaaaagtgaaaacctagggccccgaggttctgagttggatccaataagtgtgttgggagggcctgctcctgaggatctgccttggcacctgggctaagccaggattctccaccttcataacaactaaacaactaccttccctgctatttgggagcatggcttagcaagagatgctggttcctggcttgtgggggcttatcttctttctcagctcatcttaaacagttgaaggggagaagtacgggaacaaacttggatggcagaatatcatgatgatgctccagaaagttagcccaaaatgatcgctaacctgattcagtgctgcccagcacgacaccctgctgcggtgggaagattctgcgtctgtgctgtccagtgtggaggtcactagctgtgtggggctgttgaatgcagtggtgcaactgaggaactatctattagattttttaaattttgatttttgagactgagtttctgctctttttgcccaggctggagtgtactggcacaatctcagctcaccgcaacctccgcctcccaggttcaagcgattctcctgtgtcagccttccaagtagttgggatcacaggcatgcaccaccatgactggctaattttgtattttgagcagagacaagttttcaccatgttggccaggctggtctcaaccttctgacctcaggtgatccactgcctctcaaagtgctgggattacaggcgtgaaccaccgcacctggcctaaattttaattaatgtaaatagccatatatggctaattgcagcttactagataacacaagcaactattttatgtggctaaagccagttgtgtgtaggtggatttgttgttggctttctgaatgctgtgatgctagccctaatgttacctataaatgttcagtttaaaaatagcaatagtaataataatcaaaatcataggtggcacatactaagtaattaccatatatcatgtactttgctaagaactttatatacattgtctgatttatacttatataaccatattatccgaagttttacagataaggaagccgaggtgctggaggctgacttgtctcaggtcacccagccagtgagtggcaaagctgggattcattccagccagcgcgactcctgagaagttattctttgctccctgtcgagacatttctcagtgttgtttcctggctggtgttttaaaatacagccaaaccctgattattaaaagcaaggcagtgttttaaggtcattaaaaactggggtataaacactggacatgcattcattccatgctttgcagagtgtagagtctggatcctacctggacagaaggcagcgtcgtaaatgagagtccccaggttgcagagacccagtcagggcctggtcacctctcctctaatatggagggtggggaaagaccttttctgcctgagctctgggaagctcggttctccatcaagccttagggtgagaaatgggcttgcctgataagcatatgtggatgataaaaatgaggagaggatctgcatggtattttcttctggagaagtttcacctagtcttttgcaaggcaggccgatgggggctgatcaccttaattcaatcaggtcctgcgttggttgaaggctagcttggagttttggtgaggctgtgtctactcctttttcatcactgtccctatggcttccagtgaagaccccagggattcccccaggctccctctgcactggtaggttctgagccctaatctgtgtctcttcagcaccatgagatattcagaacttggctgtgccttgtaacagcatttctgcttaactccttagcagtgtgctcctgtagctttagaatatgggagaagttacagatgtggggctctgttctttgcccccttttactcattggaattttgactcctcagatctttcatttctgtctctccagatactaaagaccccaaatgcattgctgggttctctaggtcttggtagcagcctactgcttggaccctttgcaggttttctcagtaccaagaattagcgtatgccctgagggaagagggaggggctagggaaagtcaactcccttctctgcaccatttttattcctttgggatttctttcctcaagttttagcactctacaagaccttcaaatagcttgcacctacctactcacctgcccacccatccatctgtctggattttcttgttctcaggagtatctgtctgccccagtgattctgtcttaccctaagaaatgactaaatagttatagatgggctgaaaggactgtttcatggagaaggcatccatctgtttacagtggaaagtcaagaatgagaccactggaaggctagcaaaataggcccaatccccaaatccaaaccttgggctaagacaaaattaggagtctgctattaataggatcttttggtgtcctaggcagcctctctctaagagcattagctgtgcctgggtgttaatctcttggcatgagtttagtggaaaatgtaatctcctctggcaaaactgcaagagcaagctttatgcggttagcaaaagtgatctgtgattgtctgtcttctgaggatgctacacaacggtgagaccactgcagcttgctttcacagcacagaggccatccaaattcaagttctgaacaaaggctgcttgccctgggggtctaggctctctttttgtcccactctttgtttgtactaacagcatctttggggtgttttccacgtgaggtaacagttatatcgtggttggatagaaaggtttgctttgaacgtggctttgccagtagccctgcacacagaaggcagaaagcccccagccccattgtctgttctgtttgcttttctctagcctgcacagacaaggagttgcggaaccttgcctcccggctgaaggattggtttggagctctccacgaggatgcgaacagagtcatcaagcccaccagctccaacacagcccaaggcagtaagaccattttaaatatcacatttcctcaatttattagacattgatttagggttagcaatatcatttgggggtgaaaaacacccattacattaaatatatactttgactttaaatatgtcccaatctcaaaaaaaagttggattaaaaaatgtttagtataggcattttgaaaaaaatatatgatctcaccattttaatgaccgtaagcatgctgtggtacatactttaaggttttttctggtgtcatatatgaaacagcgtgtgtgtgtataattacaaagtttggatcatactttccagactgttttatgatcttttaccatgtagaaatgtgactatcttttcatgttgtgaatagtattctgctttctgatagctacacagaatcccagtttatggagataacagtttacttaatttgatctttattttgggacattgaggttgttgccaatgttaggctaatagaagtaacactgtagcaaacatctttggtgctatgtctttttgtacaatagtcagactgcatattgtcttccacagaaactcccagacaggtgtcccctctccccatccataacatgcagattgctcaaggagcctcccgccagcatcaggtgctgagttggcagagaccatactcagttttgtcataagctgcagagaacactcagagtgggtcctcacatttgcacatcaatggagtctctttgatgcctttaattcaaaggcagttaggtataggcttctccacactgtggccaatgagcacagaatagattactaaacacaattatttgatatatgtagtttggccacagccttctctatgtagccattctgatattatttggtcaaaatataaaaacacatcatttaaaacagcatttcacctgatcccctgcttgtttggaatttctgaaagtaatgctcctggattgaatgcagtaggtaagaagttagttagagtagcaactgttgagatcccgagtttgactagcatctggttttcagccaaaacaaaaatgatcttcttaatttttagttatttttggctgctcatagccttctagagatatcagtggagaacatcaatccaggggacaattattttagtagttgggatcttttaccttaagaaaaaaatagcatttaagtgtctccaaagtggttcttggtggggttcttggtggttgggtctgttggaaaagcaaaataagattttttttcccctggatcctctaggagcagcctgacccttgggttttctgaacaacctatcaacaaaagcagattgatgtgaggagagcagctgcttgcagcctccagtctctggagatttctccagaagacctgcctttgcccaaaagcaaattgagtcccctaagaggcttttaggtttgatatcctgaagcaactggagtgaagggaatgttaaagcatgatgttggttagcccagaaggccagaggagtgagcggcatttgagtctaggagttctgaaggggaagccctggaaccctgcttggtccctgcactcttggggccaactagaagggctgctctcctttctcctgcatgacaggcaaccacagatgtcaagatgcaggcactccttttctagtagtggtagggtgggctgcgcttgactttttgactactgcccaaccagattggcacttctttttgccgaccagtcagcagtaaactcctcttgccttatgcattaaaatatcgatatcctataaaattgatgtatgtaaaatattgtttacaaaagcatagagctgtgtagtgccaaagtaaattatctctcattcagcagcccctgagggacagcatcatcaaagactattgacaatcatgacattcgatcaaagaaggggccacgttatgtcccgtagcctctcttctggaaaaaaaaaaagaggggggtgggtattttaaaatgtgttctaagatattgaataaatttaaaaatggaaagattttatgttttaaagcaatagagtttacaatagctagaaaacgtctcccaacatttttttttttttttaattgagcactatattcctgtcatgcctgaggctgctgaaggggacaagacagtcttttccctcagggagcctatagtttgattaacaagcatggacaatgaggggaagcatagggttataagagagctcagaggaggagatgctgtacttattttactggcttctagacagtgaagacttttctgcaaagatgctgctttaaagagtgggtacagggccgagggcggtggctcaagcttgtaatcccagtactttgggaggccaagacaggtggatcacgaggtcaggagatcgagaccatcctggctaacacggtgaaaccctgtctctactaaaaatacaaaaaaattagctgggcatggtggcgggcacctgtagtcccagccactcaggaggctaggcaggagaatggtgcgaacccgggaggcagagcttgcagtgagccgagatggtgccactgcactccagcttgggcaacagggtgagactctgtctcaaaaaaaaagagtgggtacattttgctgtattctacatttcactaagaaagggttcctagtgattcacatagaaacttaatgaccaggctgtcattaatgcttaatgatgggcaactgaccccatcaggcccccccttgcactgcccatccctaaacgtgacactctaggccaactggatggcctcaggacaggaagatcaagtcaggcagaaggctagcagaggtgtcattgagaatatgtagattctggattaagcttgccggggtctgaatctccattctacaattgtatgaccttgagccttattttttcatctgtacagtgggaatgatatagcaccatttcataggactgttacaaggattcagtgagaaaattaagtacaaagtgcttagaagcatgctttctatatagcaacagacgttcacttttatcattggggtattccagaaaaatacaactagccctagaaatccagtttatggaataacctgagattgcacgggacctttgattctgaaaaaagttgagttttaaatctgggacatgtctacagtagactcaatatcccgagtgttgagctaagtgttattattttagtgcatacactttccattgtggaaacaaataattctttaagaaaacaacttcttctcccccagggaaataagaaagaaattattgtctgagttgatttggattccatctcatggatctccttaggggattgcagaagagaagagtggggaacagaggcaggcacctggcttgttttgccattaacattcagactgcttggatttaaaggtcctctgggatgcaagcggtgcttctggattatgctatgttgtttcatttcactgctatccttttaaaaatattttattttggttttccagtattttttgaaatacgaaagcatagtttttggtaccataagctatacctctcactcaccatgtttctattatttctttcaggcacaccccattttaagcaaatgaaaacacatatttatatcacagatatgttaacattggggatttttcccctttagaacatattttcctcaaatgatgacttttaaaccatttcacttaaaaacaaaacaaaaaaacacaaaatattctagagaaccactaaatctgtatgctgggaaggaaacagcctcaggaagggagtcaggtgggccttggcatcttcttggggcagaaagctggggagtgagcagggaggaaagcatcaggcttggtggcagctgagatatgccttttgtttggcagggtttgacactagcatcctgcccatctgcaaggactccctgggctggatgttcaacaagttggacatgaactatgacctcctgcttgacccttcagagatcaatgccatctacctggataagtacgagccctgtatcaagcctcttttcaactcgtgtgactccttcaaggatggcaagctttctaacaatgagtggtgctactgcttccagaagcctggaggtaaggtgggatggagggttggggtccctagcccagggcagccttgctggagcagaggaggactgcgtatgactatgaattgggcagagagccacagccagagaataaataattcattccatttaatgccaggcccaaagtctcatttcttccagtttatttctgcttttaatgtggtatactagaaaaaccaagagtataaatcaagtagtcagttacttctgtctgttcctccctttggggaagtctctcaactgtccgtattttcatctatacaatgggtatagaaaccttcatgacataatccaaaggtcactgtgagctctcaatgtaaaaaataccttaaaaatgtaagagacaatgaaaatcattctcattgagaaagtcacttgtcagtttctctaggataagttcagatttatactaagtgtcctagacaagaatattttggttataaataaactccagctaatgaaaaaaagaggcaagatttggggaatagaagaaaagataccaggatatttcatataacccaaagtcagacaggttggcctgctgggggattcagattaaggacaggaagccagtggcaggtgccctgactttacctccctctgtctggggggtgcacctgagtatggcagtcacagttaatgggaccagaagagacaggcccacatcgggagaacatacaactacaggcatagctggtatatcccaccgccaggaaaggaggatggctgctaatatgaaagtatttaagttatgtatgcatagacaatacacacacaacaaaaaacgtgggtattcagtgaaaggtaagtatgtgtgtatgggatttcaagatatgttcttaaaattactagtcaaaaggcatgtgccttttaaaatttgagcaattgacctcacctccaaagaggtggtaacaatttttactttcaccaaagatatatgagaatacctattctctatggcgttaccaagcttcttgatttatgagttaggttgaacatctgtacaaatgaaacattctggaaatgtctatatgttctttgtatattttttctatcaggttcttgtgtgtttgttttttaaggaaattggaacttttctggtcataggtattgtaaatattttttcccaaattacagttcatgcatttttgttagggagaaattttaagatagccaagcttctctgtattttatggcttctaagaagccataaagcttagaaaggtatttctcactttatcttttttgctgttcacttaaattctgtatcagtctagattgtgtattacacagtcaagtaggctcccagcctccctggagatggtcatccagttgctatatatatatatataaaataaatcagttttagacttttaaatcacagttgttttacaatatgttttactacctggtagaactgtcctttgctgccattactgtttttctagaattttcctggatattagtatgtttctttccctgtgtgaactttagcatcagtttatccaattaaaaacaattcctattggtaatttttaagtatcaggaaaaattaatcaaataaaaatcaatagctgtataatatggaatcattttgttttagaacaggatctatcaacccatggtgttaattttgaaattttgttctaacaattattatacttcccttgtatttattattgctaccattgtaactgaaataggtgtttttttgcactatattccctccctggtggtttcaacattaattttgttctcaaccaccttactaaaatcttgctttgtttctaagttattctggttggtttgcttagatttttcgggtgtgcaatcatatcatctgcaaatagtgataatttttctcttcattttcaatttttatacctcatttttcttttctaattacatctgttagtacctaaaatcaatgttaagataatagccatttaaaaattttagtagtgtaaatacttgtagtgattctcagcattaagactagtgatagttttaggtttgagttcgtattgtaacatgtgatttttagcatggtttccttacaacacagagcctatgtgttaatgcttgcctggaggtaacagtgccagagctggtcacctggccacatgggacatctctggatagactgcccttactcttgcagttgctgaaagccagaaccccttcctgtggcacagcatccaggaaatgctaccttttataatccagatgaaatttgtttctcctttactctgaaagcatcttaaaacaagaagtcaacaaaatgtattttacaagcagtttctctcatggaacaagcagcaagaccaggtagcattgtgcagtctacagggtaagagttgtaaatggttgcttagatactttatatgcaagtgtggggcctgcagaaagaggcagtatcagccaaagataagaactcagagaaccagaactcctctgccaaggacaggatgaaccatgaacaaatagcagaactcccagagccacaaggtctgcaaaggcaaatcatggtaaaactctgaagaatgaatgaggtcacttttcattttgcttagaatgaaactaacttcttttctatgacatgcattttgccgctgaggacccagaggctgggacaggtgaattcagctaggaggtggcagagcctagatacaaagtctcatcagtgcttctccagatctcttctgtatcttcatagttgtccctcaaagcctattttactttcctgggggtggtgaggtctgaagtaaccattcctatccatcctttcctacaggaaaacctaggctatataagtatttgtcacctctggttagttcgtctgtggattcagaacacttccccactaataagccttggctgattacttgcttcctgatagaaaggaaaaagtccattacaccacctattagatacttggtatttgcttgagttggtactagaaagaaaaatttctatgcaatgcaagtggcccccaaatactattttaagtgcattgtggtatgaggtttgttttttaactagtaacactaatggcccgaatttgttttcttgcatagtaacagcatatggaacaattccactcccaggtgtgtcattgtctacatttcacatcaagagtgaagtcaatcattagcgattatactccataccatctggaagctgactttcagaaattattttttaggtctcccttgccagaatgaaatgaacagaattcagaagctgagtaaggggaaaagcctgttgggtaagtacaatttcttgccactcatttaaacaactaattaagccagccatgtcccttgtaatgatcagcatggcaatggttattcaattagggctagtgtttcatgaaagaaatgccttgttttaaccccaggcagagctcttccaggcagctggacataaacagaggactggctggttgaaaactgctgtgtgttccttcggcaggaagagaggtcagccagggccgaagtccagcaccttccccactgctaactcctccctgatcttaggctaaaacaaatcttggctttttctaagtaagatcattgaatggtgctctcaagtgctcaaactataaggtctaaaaattatagcatttcctccattccccggataggattgtctgttgaaggaggcagatgggctgtactctcttcagaatttatcaaacagggttgaacgacatgtatgtgcttaagcctatttctaccttcacctaatccctccaggaaagtatgcaggctgtttggacaccacggaagcaagtgggttgagtgaatgtgtgttcccctaacatgcacaacttgcagtcctctcaaagtgtcccctttagctccaagcctgcctttctccagcacgtggaggaagtcctggcatttgtcatagaaacactggccattctcattggtttgctgaagaaaggaggagcctgctttgctttccttgcttttaaaaaaagaggtgtcagctgcaacacagtaatacagaattattcccgtgaagcattcagaggcagatgcattccccaagcagcctgccatttcagaagtttctctattcatttgaaggaaatgaatagagaaggaaatgggcaagttttcttgcagattgtcaaatgtaggcagtctatgaattccggtgattttcttctcttaggattttttgagttatttcaaaatgcatgtagacttccccaaagttgtcaggatttcgaactctttaggcctacattcttctgctgagtaaaaggacataaagatatatttctggtctgaaggcaaagtggctggatccctcctccataggattttctagtgcaaagacttgtgtttgtttattgatctcatttctccatgtgggatattattttgagtgacgtacctatgatctgcaggtagttgtagaattagtacattgctgtttattaaaacatacattgcctcattggtaagggtcacctgtgataagatgtctcatttaccccagtgcacatgaatgaaatgcctacctttctgttaaaataaatcccattttgttttaaagcttgctttatcacatttcccacatatggagattactccagctgactcagaaaaaatgccatttgcttacaaattctttatgtagtcaggggtatacagagtcaaataaataaaacaatcaacaaattattatcagctataattattgcattgtagttttagagcagcacctgcttcttaccaacccagggcctcagcccattttttttttttttttggtccaaggaggagccagctctctacatgttcactttctctgcagtccttgattgagaatctgttcacaaatctctttttgggctactgaccgcatctacattttccttcttttctatctactgttctttgaaaactgatagcatgcaatggcgtacactccttaatgagagggtggataccactaagcttctaactgtggcatcagcagcctttcctaagtgatagacatggtgttccatggtctcatttaatctctgagaatatgatcatcttggtatagcctggtgagtagcatgttctagactagaccctagagtcacctgggtctgggttgaagtcttggttcaaaataggagaaatctgtccctcccatgccacacttttattctgggattgttccactaaataaaaggcaaatttgaaaatgtaagcacgctcacaaaatcagaaattaaattagggcatagaaagctacagtggaaggcaggaacctctgttttcaggaggctgatgtagatggtgttaccacccaggttacacaaagaggaagaattcttccatagaagatgcacactatcaagaaacacacctaccctgtaaggaaaaccaaaactaaaaactattataaataaagattacccacagtacaatgagaatcagtatcttcaaagtgccaaggggaaataattatgaacctacaatttaaaatttatcccagtgatcattcaagtgtgatgacagaggtactctggtactctgaaaccatctaagattcagtcagcttactaaccccagactcacttaaatatcactaaaggatttattctaccaaacaaatgatcccagaaagaactattcagatgcaataatgaaaaagaaatgacaattctgctaagaccaataaaaatagttatatggcaacctggaattaaaattccagacaattgggggaagtgagaaaaaggtggtaagaatgtgttaagcttctagtttgttcatgaaaaaaaaaatctgtatagattaactgtagattttactaggaaaaactatgttcccctgtggaaaatatgagtaaccacaagaatattagaatatatgttttaaacctatggaaaaaagacaaggtataaagaaaacttagtaagtaggaaacagatatggtggcagaaataagagtaagcatttctgtaatcacaatatctgtaatcacaataaatgtgaacaggtcaaacacatttattattattgattagtattttaaaggagagttatacaaaaataattccacagaaagttgaaattaaatgagggtaaatactcttttttaaacaacattaatatctgacaaagcaaatctgttttttataatgcaatcatctcgctgaaatatcccttttaccatattatgccatcagttgctctatagacatgccttgcttaatgacagggataggttctgagaaatgtgtcattaggtgactttgtcattgtgtaaacatcatagagtatactcacacagacctagatggtatagcctattgctcctaggtataaacctgtacaccattttatcgtactgaatactacaggcaattgtaacacaatgggaattatttttatatctaaacatagaaaaggctagtgaaaatatggtgttataatgttatggaaccattgtcacatatacagtctattgttgactaaaacatcattatgtggcacatgactatactcataacttaaaatggaatagaactgtaagggcgaattatagccacagtggttttcagaaactttgacataccacttcctgaaacctacagttcaagtagactaagatttgttagcattcatgcttatatatgtattcctgaatctaggcattgaatgtagtctttcaaacatctgccacagaccgtaccacagaagaaaacaaatttcaaataaatgatcacagatcaaacttaccggccacaacacaataccaatagaagtaaaatatgagattactaaacccccatacatttggtttcatgaataaaaattgatcaaagatgaagaaagaaaaatctacaaaatatctagaaatgaaagaaaatgaaagcatggtgtaccaaatacatgggaagcaactaagtgaaacttcatagcgtcaaatgcatttataaaaaaggatcaaaataaaattaactagatgtaacttaaactataggaacaacacaaagtgaataagatgaaagcagacaacagtgaagtaaaaatattaaaataccatatcagagatagttttctgaacaaatgaaatagacaaacctttgacaatatgaagaagtaaaaaggctcaaatagtgtcatgaatttaaaagtgggatataagctcagttatagaagaatactgtaaacttgtggttctcaaactttagtatataccagaattagctggaggattaaataaatgaacagactgctcagccccactctctaagtctcaggtggggcccaagaacttgcatttctaagggttttccatgtggtgccactgctgcttgtcctggaacctcactttgagaaccactgctataagtcaatttataacaattatgaaaacctagttgaaatggatactatcagttaccaaattttgataacagaagacccaggtaaatcaaaaccaaaatcaaaaccaggaaattaatcaaaatgctactttcatccctcaaaatgagcaccaggctcaagatatttttatgggcaaattcttcaaaaaagagattctcattttataaaaaaatctctagagcatatctgaatcattttatgaattaggaacttcaaaagaaacaatgcagaaaacaccaaaacaaaattatatgcctcaatcactgtattagtccattttcacactgctatgaagaaatagacctgagactgggtaaagaaaaagaggtttaatggactcacagttccacatggctggggaggcctcacaatcatggcggaaggcaagagagcgtgtgcagaggaactgccctttacaaaactatcagatcttgtgagacttattcactatcataagaacagcatgggaaaaactcgcccccatgattcaattacctcctgttcaattacctcccacagggtccctcccacaacacgtgggaattatgagagctacaattcaagatgagatttgggtggggacacagccaaaccatatcaatcacttagtaacatacttgtaaatttgtgccactagtaatccatcttgttaaaagtatataaagcataaaaaccatatgattttctcacattaaaaatgtaatatcagtagtacccattcaagatttaaagtgaaaaattagaactaatcaaagaaggaattttgcttaacattgggcaaattaactccagtttatcactttttttttttttttttgcctgcaaacagggagatagtaatagcaacaccttatggtgatattggcatggcttgatgaaataatgcaagtaaagcacttagctattattaattacctctttcttagaggctggaagacagtgacaaggaatagcttggaaccatatgatccacagactggtgttgttcatagaacatttgttactagtcagaaccaagtgcagtagttaatgcgtatagaaagttttataacaatttcacggagtcactttatgtggttgggcaaagtattggtaatgctggacttgatatttactagcagatgccttgggaagattacttaattttcctagacatcagtttcatattaaaaggtaatgatggtatgtatctcttagagttgtgggaataagagattctgcaaatgtatgtatatatacacatacatatgtaagcacgatttaggtcagtgcccagaatagaagtattcaatacatgatagctattatcattcccgtttaaacactgacatccttagagctcatcgcgtttgggcctctaaaggttaagggccctgtaattttgactaatagccaaccatccccatcctctgctgctgaccctgcagcagatattctgacatgtgagccctcttccctgtgttgacgggcattaaccccgagtatcatctgcatgtctctgattaaagttgcaccttttgttcccccaggggccttcatacctcggtgtaatgaggagggctattacaaagccacacagtgccacggcagcacggggcagtgctggtgtgtggacaaatatgggaatgagttggctggctccaggaaacagggtgctgtgagctgtggtgagtaaggcctcctgcatgagccccacaatgacctgggtggcctgtggttcctcactgcataaggatctctgcagaagaatgttgagaggtaactccagtatacattaagtttataatagaggcatagtaaccctgaaatcacatgagctcccgtgtagctagcttggcaagtggcaggaactcactatgaccagagaagagagacagaactgctgcagacaaagggtgacttaggctgccttcacttctcatttagggttgtaaacctcctgggaaggtaggagcatctcaagaattctagggctcttacgagaacaaagtttgtaatgtatgccctgaagactcacctcagtggggcagggatgtttctgttttcagaaagtaaactgcttggttttaccctacaattcaggcaaaggaacccctgacgtgggtcatgaggtataagtggaaactaacctcaatgctttttttaatctttcagaagaggagcaggaaacctcaggggattttggcagtggtgggtccgtggtcctgctggatgacctagaatatgaacgggagctgggaccaaaggacaaagaggggaagctgagggtgcacacccgagccgtgacagaggatgatgaggatgaggatgatgacaaagaggatgaggtcgggtacatatggtagtgcccacaagaaagaggacacaagttttgcacaaaattgcaagtcacttcctattcctgcatttgtatctaagactccaaggcaccaaggtctcttctccattgttgctctctatacccgacctaaggtttggaagacaactgcttgttcccagaggattctgattttgcatatgtttgtatgggagaaagggtgttgtgttttttttttgttgttgtttattttttggatagggaagtcattggcttaattagagcctccttcctttctgtgagatttttccaacaagcatgtgatttacgtggaattctgacagtgcagggagccccaaccctcttaaatgtcaaagaccctttttgattacccacactggtggttattacagcatggttcccagccttacagtgtctaagtgcttctcttgtgtcctgtagatgttgtgaaaaagaaaaaaacaaaaaatacaccacactgtactttttccccctgcccccgttactgccggtgattattattaaaaattagtttttttcacatcattatatctggcttcctataaacaacagccttaattcagtcaagactccctttggggaattcattttattaaaaattggtgtctggatacttccctgtacatgcataaatatgcatgcatgtacagaaagactgtatgtgtgtgccttgcacacacacccatacctctcagaaaaagtgtttgggtatcttaaaaactcgaaaaacaatgataaatttctcagcttgtccagacctggaacaaaatttctggaataagaaatttgtattaaagtccttttttgcactaacagttggctcttgtagcctgcaggctgaggaagtctcttctctgtgcatcagcagagttactgaaagcctctgattgagaaaaaacctccgtctgcctaaatcacttttctcgcagaagccatgcgactcccacacgacacgggcagcttcacaagccatctctttcatttctgcttgaagccccttggctgcagcaatcctgtctgccataggtttcttccttccttacctactcaagggctttttctaaggcatgcacacatatctcctgttctctgagagtaccatggtgttccttaaaagaagaaaatttctaattctgaactcaatgttttgcttttactccctttctactgacaaatcatgataagggcacaaaagctgtacagatttttttttttaaccactcaatcccaaatggaggcctacaaagaacatcgtaataacacatggaagcaaaccctgggtttttaagagcaaattctgtccccccctcactcccccaagtgacaagatactaatgaagaaagttcttcaccatagtgtttgttttaactaaactcattggagtctagttccaaatttggtagggtcatcatctctacattccttaggatttctctccctatcaagctggcccagatacaagtaccaaacagtagtctctgaagttcccccatttccttcagtaccagtctataagctactgtccgccactgattttcatttatcagggtgtcctaatcagaatcagccacccaagcaagcctctctggcccacatatctatctcttgccttcccccatgaacttcagcctgtccacacaaaagccacataaactcaagcaagaaatatgttcagccaaaacatgattatagtggcagctgaccaatcccccatcccaaattgaccatttagatgtaccaactcaccttaaattagcatgttccaatccagtcggcattgcctgaatacagtagcatcatacctatagttggtcttagataagaaatgaactacttgatatagcaaagtcctttggcttcgtaaataaccctgaggttttgtacttactttccccataggaagacagaccataggcaaactctgttttgggatctcaactccatcacctttgtttcaatattttttttctctcttgaacaaaactgagataatttagaaaacaggtgcttaattgcaataaaattactatgaagtatattaaaaatcacgacattgtaaaatctcactttagatcatcaaagaaaaccattgttactatctcctttgagcttaggaaaatgtacaagagaacaaattaaaattgaaaaattgatttcacttagaaaaacttctaggaacagggtgaaccactgattttaatttgcctaattatcttatgacaagtatcaaattaagatgacacttaaagatccttagcattaacttaatgatggagaagagtgctcaatagacagttcccagtaaggtaatgagatgccattttcagagacattctaagaagatattttgattcattaaaacattaaataaaaagccctcctcagattggaacccccaaatcgatggagccacattaataatacttttcatgcctcactttgacatgacagcattcgatttttttaaagatctttaatactttccatgagtactaaagattgtaatgagttaccttatccttagaagtagaatgtttgctttcttcttcttggaaatagtcctccaaaaagtccacttgtaccagtgacaagaagtcacttgtatagtgaccaagtacacataaaatactgattataaaaatattgtaataaaccacttcctcatttgatacaggtattaagctgaatcctcactaattcacttttgaaaagttcttaatgaacagttttattcttattccatgaacagctcttttaatacaatttccttggtatccaacttaaatcccagaattttgttccaccatggttagttatttgccatatgaatgtattcttgtttctaccaatattctaggcatgagaataccttaatactgagttggagattttgtatctgtttctcctcctttacgcccattttcctacccacagcagcaaatgacaacgtgtctgtccaggtctgtccccctgctcatcccaggatgccactcacatttttttcttcttgttaccttgaccacgctgtacagtaacatccaagagcccattctacagtgggtggttttggtctttttataactttttctcaaagtcactgatgtttgttcctgttaaatgtatagcattgtaatgagagcccatcaaatcctgagtgtcagtttgttgtccctattgtagatgaaatagtgatgtagcaaaaacctagtaaattctgaatgcttttccacgtagacttatctggaatgtgaacacaactctttggttaatagtaaatgcttaactgtagtcctgagtaggtgcatttctgtctgtctcaataaattttactttgtctgcaa

SEQ ID NO: 11 - DNA, 38265 bp, Homo sapiens
aggaggaggagacggcatccagtacagaggggctggacttggacccctgcagcaggtactcggagcaaatggtgagatcagaagggggatgatgtcattccttcgaaggaatgaattaaacgtgcttcctcgtgtgtctgattgacagccctgcacaggagaagcggcatataaagccgcgctgcccgggagccgctcggccacgtccaccggagcatcctgcactgcagggccggtctctcgctccagcagagcctgcgcctttctgactcggtccggaacactgaaaccagtcatcactgcatctttttggcaaaccaggtacgattatttcttaaactcaatcaattatttaatggtgctctaattttaagaaattagagttctcgaactctaagaagcggagaagaaaaaggagcaatttcgattcttaacttaaggtgggtggtgtatctattaacactaaatggcaagtgtttcttcacgtggtgtttctactgcccgcttgaagagcaaggcacgtggccgctcctcagcttttcctccgtggctgtgctttcaccagccgggcaccccttcctctctgagggttgtggctgctgctatttcaatgtatatacctgcctgggaacccgggtaaacgctttatgttttcagtttccgaagaagaagattccacatgagagtttgttattgaggagagaattagaaacaactcccggaatatctgaaaagtaactggagattagagagagactctgattgttaacatcattattagtagattagagagagactctgatcgttaacattattagtagattaaagagagactctgattgttaacattattagtagattaaagagagactctgattgttaacattattagcagctgaaaagtggttttgaacataactagagagtatttgtggtaagtctatggaaaatcctgtgactgccgggacacacagcgacttttaacagtcttggggcagtttgcatatgaaaagcgagctggcaggttgcctggctaccacttaaggaaggtgggtttggctgcccaggactgggagctgagcacccaggagtctggtgtttaatcagactgctgttggtggtggacggccggtaaacaattagctctctgcaaagctatcttttactttgattgttcatacgaaaagagttttaaaagacctttgcaaattcaaactacattctgctgcagacaggcaccgaaatctttcttttggaaaaacacaagcataaacgtggatgtgtggcgtgcagaggctggggcaggggtgagcggcactggctcatccgtggctccatccatgcatgcccggtgtccctggatgggctgaggccaggtagcctggctgctcatccttcctgtgggatggagcctcactgtcctttgacaatccgcagcaggggatgctttgttagcctcctgctcttgtaagaatctacctcaaggcagagacagtaggatctggtttcgtcaaaggagtttgatttagtttttctaacctgtccttatgaagctgggcatccagaactttcgcatttaccatcctgttcttggctggcctctgcagggccagccccacacagctgtccttaggggactgcgacgtacccggcagtgtgggctgatgaggtggggaggtgggaagagcctgccaaggctgtacctgagctgtgtattctaacaccgttctgtggtgcttactgcatgcaggtactgttctaagctcatggccaagtgttcgctcctgtcattaaaccctcttaagagctccatagaaaggccctatcagcaccaccattattactgcagctgcctcgggcagttagagtagaaagcgccccagacccagaggcacattctgctccggtaacccatgcctgtggctcgctgggctaagtcagcccctggtgaagtttcatttgccgaattcatctctcatgacaacccgatgaggtgggcattttacatgacgctacgtttcattctacggatgaggaaactgagacagagaagttaagtaagtttccctaggttgcacagctggtgctcagcattgctcagcctggtgctgactccggccgcaggccgtgctgcttccggagccaggacagatgaaacaatcaccaaggacccctggggcggcactggggggagcagatggtttggggggggggtcccagcagcagatgggtggggggtctgcaggtgctgccaagcatttctcttcttctgaggaatgtttctctattcctggaaggtgaggatttccaggttaccaaatgttgtttctggagagggagagtccttggattaacaatgagaagttaacggcctttgatattctaaatatgggaagaattggggtctcagtcttcccttcaacctagagcagggtgtgaccaattgctggaagggacctggggagccctgggaccctcaggctcatgctcgcccggaagaggagaagctgagatccacagggttaatcgcccagccgggctttggaccacatctcctgacttcggggccagcctccactgagctgtgccaacttaaaatccccaagaatggaaaaacaggcctgcaggaaaataaagaggcagggtcaaaatgatggctaagtcaagtgttctgttgttttgtaagtataattcaccaaattaagtttatttgtaacttttttttacagttgatattcattctatttaattaggttatgcataactgttttttgctggatatttacacaaaatgcgttcacagattatttttgtcaggctggatatttttctaaattcaaactttctacatctaagtcctgtctacgagtcgtatgaacagaattactccaggcaagcgctgaacttgcccatcttccatttgctcatctgtaaaatgaggacaattagagcagcacatacctcccaggctattatgaagatgaaataataggaatatttagaacgtgatgtgcagtgcttgccggcaaatgctagctcaacaaatcttatagttagaagaatcctgcttgaagagtaaatttcctccttcgctctcagtttgccacaaatccagttggtgctgagttttatatgcaaactgttattcaatggtcatgtgagtcactgggccagtctcgctcacaggcagggttgcagctgtggactcatcactaacaagggtttcctgtattcccaggagctcagctgcaggaggcaggatggtctggaggctggtcctgctggctctgtgggtgtggcccagcacgcaaggtgagtgtcctcagagcctgtggtctctctctggcttgtgagatatggcttagctgcaaggggagagatgacaaaataaagtgtgtggttggacaatcttacccgtgaggaccttctagctcctttataaatcaaatagtaacttacttctgagccaatatgacatgagataatttatctttggaaaattcaggtgttagagaaaaatgcaattccacctagagttgcacagtttatccttttttctatagaggatgttcacaacactgcaagtatttggtgtttgttgaattctttttgctccactttcttcctcctttaaatattttcccatgtgtttacttttctacagtatgatttttaatgaccacataatatttcatcacagataaagcctgatctttttcaatcaattcccacttagattggtttattttcattagcataaatgatgacacaaaaaatattgacgtggataaatcttaagtagcatttgtgattatatcctttggataggttacaaaattagaattgctgaatcaaagcttttaattcttgccaagtaactctatggaaagtggtccattgcccacttctgtcagcaaccctgtgtattatcctgttctaatttgctaaatattagatgaaaaggaaggctttggctaaactttctgttcagtgtattacttttttttttttttctgggacggagtcctgctctgtcacccaggctggagtgcagtggcgtgatctgggctcactgcaagctctgcctcccgggttcacgccattctcctgcctcagcctcccgagtagctgggactacaagcgcccacaaccatgcctggctaattttttgtatttttagtagagacggggtttcaccacgttagccatgatggtctccgtctcctgacctcatgatccacccacctcggcctcccaaagtgctgggattacaggtgtgagccaccgcgcctggctttgaattatttaaactattatgattttcgtgagatctgatcacttttcttgccaatagcttaggtggtgacttaaaaccatttgtttctgtacttgatactgaccactctttcagatccttacccacagggtgcattaagagttggagaatacatttttacaaaataacaacctgctgacataactggttttaggcagttgatctcaacaagaaagcaacatacgatttagccgctttctgacactctatcaatagcaaggctaaagatccatgtctttcccagtttattcatttatttggttttttcctgagcaatcaactggtagacaggatggctgcttttcagcctcagatctgagatggaagagccagacagagtgacctgggacatgtgccaggatgtcaagcgaggccgggattccctcaccaagaaggtcgggctatgcaaagggccagctgaacggacagggcgctgcctgtctccaccgatttaccttctggcacacgctcctcgaccagccaggggcagaaactgaccccacagacccgcagctgcgttgggcccacactctgagtagcggcactggcacggaggatagtggcttttcatcagaggtggctccaggattcccataaaaaagggagagaagctgcgggatattgggaggcctcgttaatttccttacacgcgaggttctggtttgtcaccctgggtcaggccaacctcgccctcttcccctacgtcacccttctccactgcggttccctttgcagctggtcaccaggacaaagacacgaccttcgaccttttcagtatcagcaacatcaaccgcaagaccattggcgccaagcagttccgcgggcccgaccccggcgtgccggcttaccgcttcgtgcgctttgactacatcccaccggtgaacgcagatgacctcagcaagatcaccaagatcatgcggcagaaggagggcttcttcctcacggcccagctcaagcaggacggcaagtccaggggcacgctgttggctctggagggccccggtctctcccagaggcagttcgagatcgtctccaacggccccgcggacacgctggatctcacctactggattgacggcacccggcatgtggtctccctggaggacgtcggcctggctgactcgcagtggaagaacgtcaccgtgcaggtggctggcgagacctacagcttgcacgtgggctgcgacctcatagacagcttcgctctggacgagcccttctacgagcacctgcaggcggaaaagagccggatgtacgtggccaaaggctctgccagagagagtcacttcagggtacgctctgcagggaggtggccgccgtgagggaggaaagagcttagctgggaactgatctgctaatgcgtctggtgatgcgatgcttgagcaggcagagcctggccttagagaagcacactgcacatcccggcatgtgctcacacacatgcgtgcacacaccacatgcacatgcacacactgcccaccacacgcagccacaggcatgtgcacacatgcacacacaccacacacacacacaaacacacatgctcacaaacacatgaacacacatccaaagacatatacacaaacactgcatatgcactcacactcgcatatgtatatacatcacacatgtacacacaccacgcaacacacacacacagacacgcacacacacacctcaccacatacacatgcatgtgaacacaccctcacatatgcatgcccatgtgcacacaaacaccatacatgggcacgcacatgcagacgcacataaacaccattcatacactcatgtgcacacatgcacaccacacagacatacatgtgaacacacacatgcacacacgtgcacacaccctacgtgggcacccatgcacatacacaaataaacaccatgcatgcactcacattcacagacgtgtgcacataccacacatgcacacacaccacacacatacatgtgaacacactcatgcatgcacatgtgcacacaaccatatgtaagcacttatacatgtgtgcacaaaacaggtgtgcacacaccacccacagccatgcaatgcacgcacaccacacacatgtgaacacacacatacacacgtgcacaaaagtaccatacacagtcacacacatcacatttacatacctacacaaacaccatacatacactcacacatcccccacacataaacacatgaacatcatatagatgcatacacagaaccacacatgtacacacacatacacatgcacaaatgcacacatactcatacacacgtatacatacacacaaacacctcatgcaaactcatgcatgcacatacatccatcacacatgtgtatacaaacaggcacacgtgcacacacaatgcatgcagagccacaggcagttgtcagcacatacgtactttcacacaggcactcaccctttcacatgcaaacaccacatacaagcgcacacacacacaacgcacgcctttctaaaccacgattaatcagagagggctgccccaggtgtgcttccctaactgcactaattatcgtcagttgagattgaggctggtttgatgatcaaggaatcaaccctattcaaatgtttctagcaatcccagacttttttgatcacaaccaaaaccactcctaaatgtttgctttagtagcgaaatgatgggagagcaaagtagcaggtgcccttttccaagggaaagggctagtgatttatgagggaatggtttcatgtccattttggttaaaatatgtttggaaatgaatcttaaactgcaggtctttagaatcacaatggtgtatggtacattgctccctcccggacgtgtagggccttggaaataagtacatggttaaactcagtaatttgagtaaaaggtctagagatgcatagcttgttgttgagtcaatttctcatgggtgtccaggagttccataccatataggactggcccagccccgtcataactcagctgcggaaggcgctcctgcaggcccagggtctgtgtctctgagaggaccagtgggactctgtgagcctctttgccaaatgcagaaactcgctaatcatgagtgacttgcaaggaacgaatggccttgaacgtccatgggaacatgcccagaacacacagcaggccacacctctccaagggccatctcactcttatttatgaaacatttccttcttctaggtagatttcttacattacacttccatttcttgtgtcatgcttaaaaacaaaatttcaaaagtactatatacagaaaaactgattataaagagattgcaaacctgctacgtagaaggaaatactctcactacttgaagattccaacttgtatttttagaatgtcagttagcttggcatcaaacattggatgtttatctgttgctctatttttctgcttgtgtatacttacagggtttgcttcagaacgtccacctagtgtttgaaaactctgtggaagatattctaagcaagaagggttgccagcaaggccagggaggtaggtgtgttgtgaaaaatgcattttatatactggcttggatggatttctattgtgacatggtgtatgtgtgtgtgtgtatgtgtgtgcattcatgcttgtaaaaatttaagtaaaaatatttgggtaactaccactattgtctttgagtgacttagctggtcaacttagacatgttgatatctgaaaataataaattgattaaacagttaattttaagtagattttaatcatccaaataattttattatagaagacaaaatataaatagctggtgctttaatatgagttgaaatatagacaacttttccagtatattaatgtgtgatgcttgtctgcctaaggaaagtcatagatatttgtcgaacttgacttacagaagttttcttttttttttttttttttgagccagagtctcactctgtcacccaggctggagtgcagtggtgcgatctgggctcactgcaagctctgcctcctgggttcacgccactcttctgcctcagcctcctgagtagctgggactacaggcacccgccaccacacccagctaattttttgtatttttagtagagatggggtttcagcgtgttagccaagatggtctcgatctcctgacctcgtgatctgcccaccttggcctcccaaagtgctgggattacaggtgtgagccaccacgcccggcctagaagttttcttatactgttcatagttgttgactccatcatatgatggaaatctatgctacttaaatcattgacagatgatctcatcttttctgttagttacaattgtgaatcatatttccaagcacactttccaatattttcttgagcatttaattctgaaggtcactatgacaggttcattaaatgccgtacatcatctaatcttcagaatgactacgtgagatgggcactttcactttcttcattttacaaagatgaaggctggcacccaagggagtgctgtgtggctgccatgttgagctccccagtgagcagggagcagggctgctgcctgggtctgtctgacagcctcaaagcggagctcacgtctgccacacggtgtggccgtgtgcacacgaaggccaggccatttcaattccaaattatgacaagcgtaaactgttatgtcatgaatctatacatcaggaatatgtgagatttggtatctttggtgcacaatgactctgtgatcccaccgcctacttcagaaccggggtgcgtagcccactcttcagttacactttgcaggtccgggtccttgtgcacgtcctgtgaggaaggagaacaaggagacatttgatcatcaatgcagggagaagggtgttctaagaccaaccctcattccagctccaactgtcacccccaccacgaccctcactgtgcctgttacctgaggggtgatttgcagcacaggcagagttatcttggctccagcactctgcgtgccagggcctcagcttcatgaggcagtgctcttctgggggttcctggggtgcagttggctgtggggcttttgggtactttttgttgcaataatgttttttcagtctgatatatttatatgtatacgtgtgtgtgtgtgtgtgtgcgtgcgtgtgtattttcactaatatagaaaaatattgtttttataaacaaaacatatatgcaaatattctttgtatgaaagaaaatatacccttcgcggtgttcctaatcacatgtttgtactataatttcacgtgggttcagttaaactagagctaaggttgtccatggcatgttgagtcagttgtcataatggtcagtgagtaaaactaacctactatgacaaacgtgacttacacctctatgtgagcaaacaccttgtgtgtgtgtgtgtgtgtgtgtgtgtgttaccagcatacaccctagtaggtgcagcctccttcagcaggtatttcctaggctcacaggtacaagtcaataatccctggaactatcaaaagcaaacctttaaaacttatgggaaactcttagatcttccaaaaaaaaaaaaaaaaaaacacagagaaatctagatctgttatctccagatgtgtagaataagtatggatctatatacatatatctaccggaccatatgtggcaatcacccatgagttagtctactcaaagccaggtggatgccaatgtcccatttggagatctttgccaacacaacaaagacttcttcttcactggttatgtcagacttaaggaaaattggtcttatacaaacagctagttcatggattggttcttggtaatgacatccccttttccactgtttgttaaaagtgagagtaaccttgtgaagaggctgagccattattattttacaactgagaatactggcagaagcctggagaaatgcaagttagctggaaggttttactaccaggtaaaactacattcctgtcagagccagagcagaagcaaagatatatgcggtcttttgtttaacttttagaggaatgaaaaacaaataccctaggttagttaaagattagtgtgctgggtaaaatccactcagggtggtttctttgtctctattaatgtgttgatattgacctgattgtacatggttatgggcaacatgaatccgaggggaagcttctgagcttagtatgaattgcagcacagtttataaccaagtgattaaaaactcaatcacggaatgcctgacagcgctgtaaaatgtctaagtctttcctcaataatggactgtccgagagaagtcaggcatttcaaagatgggatcttcacccctgagagggagcagggtcctacatgggggtgaggtgagctccggcctagagcctgggccctgactgcaactgcgcaggccccgctgacctgaggactggaccccgcctccgtccctgactcgcctcaggtcaatttgtaaattacatgccatacccacccaggtcccacgatctagggcttcagagggagtggtgggaatgtggaaaggtgggagtggtgggaaggtgggagaggtgggaaggtgggagaggtgggaatgtgggaaggtgggaaggtgggagcggtgggaaggtgggaaggtaggagtggtgggaaggtgggaaggtgggagcagtgggaaggtgggaaggtgggagtggtgggaaggtgggaaggtgggagcggtgggaaggtgggaaggtgggaatgtgggaaggtgggaaggtgcgaatgtgggaaggtgggaaggtgggagcagtgggaaggtgggaaggtgggaaggtgggaaggtgggagtggtgggaaggtgggaagatgggagcactgggaaggtgggagtggtgggaaggtgggaaggtgggaaggtgggagcagtgggaaggtgggaaggtgggaaggtgggagtggtgggaaggtgggaaggtgggagtggtgggaaggtgggaagatgggaagatgggaaggtgggaaggtgggagcggtgggaaggtgggaaggtgggaaggtgggagtggtgggaaggtgggaagatgggaaggtgggaaggtgggagtggtgggaaggtgggagtggtgggaaggtgggagtggtgggaaggtgggagcggtgggaaggtgggaatgtgggaaggtgggaatttgggggaaggtgggaagttaggagcagtgggaaggtgggaaggccaggaggagcaaggcacagtctcaaggggactggctgtttgagcaagaggatagtgaattttctttaaagcagagcaaggagccataagaaagggtgtttggggatgaaaaaaaaaggatgaagagtcgagaggagccgtcagaacatatgggggatgtgttcaagaagcagatttgtggtcggaagctttgcaaagaggggacctgggtctgagtgacatgcgtggccactggtgctcctgcgtttggactgtgcaggcctctcctatgctgatgcgtctccccactcctgagctaatttctgctctgctccttctgtgacatgtggcagcgtgggaaatagccactgtcccctgtccctgctgttcctggtgtcacccagcaccaggccactctgggagccagggcagatggtcctccctgtggtcctggcctctgctgctggcccagtcctccgccttgtgtctcccagcaccaggccgctccgggagccagggcgggtcatcctccctctgttcccagcccctgctgctggccccgtcctctgtgatgctcacggcccttctacgcttgccctcagctgagatcaacgccatcagtgagaacacagagacgctgcgcctgggtccgcatgtcaccaccgagtacgtgggccccagctcggagaggaggcccgaggtgtgcgaacgctcgtgcgaggagctgggaaacatggtccaggagctctcggggctccacgtcctcgtgaaccagctcagcgagaacctcaagagagtggtgggtactcacgcaggggccgcgggggtcatagggcatgggcagctccgccgctggcccatctcagcaggtatcaacattccctggcttggcagtgcctcatgctcgatgtaaaaacccacagttcacaggggaggtgtctgccgggctcctcaggatccttgctcaatattcagcattgttagagggaagttgggtagatcttgggaagtattcccaaggaaaacagtcctgggcacagtctccaaaataaattcttaattttgggaaatttacctccttggtaaatctgtaggtatgagtgtacacacacacacacacatacacacacacatacacacacatacacacacacacacacctgcagaggaaaataattttatttcaaggactgcatgttggcatagctgaagaggcaggacgggaagttcctgtgaggctggcaggagtgaaatgggtttgagcggcacagcgcggccaggaagagagagcgatgcctgcggggctcaggacgggcagctcgcagtttagagaaagggactgaacataatgaggtgctccgggccacggtgccccacaacatacacatggctaaccagggtgcagtgatgctgactgtcactcgtacccagagggcatgaagtaaatgatgccaggagatggagcccagggcagggagggcggcaggggcaggagtccggggcagggagggcggcgagggcaggagcctggggcagggagggggtcgatggcaggagaccggggcagggagggtggcgagggcaggagcttggctgtatccctgcctgtcgttatggctgctgcctggggacctagttcccaccccagtcccacctggcgtccccagtcgaaggagccccagcgttgctctgcactggtccaggtgtgatgtgagccacgcgatttccgctctccaggaaggcaggtggatggggagccccagaagcccaggcagtgacgaagctgtggctcagaaagccccgtgaggatggaggacaacttccggaacttccacccagggatgagtcaagtcttacttgactttagagctttttaatgaaggaggaactttgtttttcatccacaagcatgatgactaaatatgtagtattattgtctacacttaaatgtttcacttgattttccagtcgaatgataaccagtttctctgggagctcattggtggccctcctaagacaaggaacatgtcagcttgctggcaggatggccggttctttgcggaaaatgaaacgtgggtggtggacagctgcaccacgtgtacctgcaaggtgaggccccagaacacggctcttgggggaagaggccaccatcggacacttggcagaacctgactgcctggaaatgccagcgttcagtgctgatgtgtgaaaccggttcagctatgtgaggaaatttcagtgtaagaaacacagaagggccaggaaccgtatttaggacttgaatcaacctctttgtttgcacataaagaaccagagcccagagagggggagcaacctggccagcgtccccagttggttagaaacaggaggaacagagaagccagacatggccctagactctgcatttaattccatccggttccaacagagcctgaggctcagcagaaacgtttgggggaaatacaagccactgcctgaagtcttacagacagacaatttagcttttaatgttactctatttctgctgacaatggcctcagcattaccttagataacaggagttcctgctgcccgtcttttcttccctccttccaggaagcttggagctctctgttgcatccttgctgctcagtgaagggagaaaggaatggaatggatgcaaagagccatctgggggccctgttcttgttaggctgtcagcactaatgggagaaaaagatgcccttattttcacatctctgtaatgtatggtccgtaggatggaaaacattcagccattctgtcgaccccttctagtctcagcccttgtaccagcgtcccctccttttaaatgagtgttccatgcatgcctttcttcacttgtagaaatttaaaaccatttgccaccaaatcacctgcccgcctgcaacctgcgccagtccatcctttgtggaaggcgaatgctgcccttcctgcctccactgtgagtatcgccagccggcaagcgcatcctgcatttttaggaattccatgcttgtttgtttatttattcattggttggttttggcagagaagagtgaggttcagccccctgagtacaggtgagagaatcagagggccaccccaggccactggtcatccactgaggactgactcatggctagaaaggagtgtggaagccctgggaacgcgggggtgggaaggccagtcctgatgcttctcagacgaggaagctgagcccagtggtcacgcaggtgagcccagagcaggccccgatggagccccagctgagagtcagagaacacacgtagatctgtgactgtgttatggcagcaagtgatcactgtacacacactcctggaaaaaacaatagaaaatcagacaaacaaaaaccaaagactgttatccgaagaatatgttctaagggatagaaatacattctaaggaacagaacctgagatggagaggaaccacgtgtgggcaccctgggggttcctgggccaccctggaaactcagtgcacgttcagagactgagttggccccaacgctgccctcaggtctctgtgctgcctcccacccctgccccgagttcccttcccaagttagctctgctgaccccacccagagctcctgagccatccgtggctccccagtgccgtgccgttggcaaggtgcttcaggtctacaccccaagttgctgctgcactaagatcaggcaacgcttctcccaaactaaactagtcaccatcccccaaacattcccagaatgtccctgtggccccagagctgtgtcatcctcagggcaccttacctctgatgtggacagagaatgaagggactcagagctcacgctctgccactctgtgattttgaataaaatgggatttttctgagtttcaaatttattgcctgtaacatgcagaaaatgtatcccctatacagttagtcttataattaaaaccaacaattcaatatgcgtaaaagtgcctgttaggtattcacaaagtcagaatgctcctggcaaagcataaaaatataatcttgataatcaaagggcccacattagactagaaggagacattttatgttatcaggagcatcatgaccaggaaaagacctccttgaccatttttcttttctttcatttccctgctttctagaacactgagtcatggcgcattcactgggcttctctcctcacgggaatgatttctggcgtcaggttgctctttccccccatttagcggctgtgattacctatgaagaatttctttacagggaatctcctttttattagcttgtttcagtttacttggaaataagtgacctgtaattttcaccaataattgaaatgtttcactacattatgtaaatcagcgaacagaggttaaatggaaatacgttacatttttgtaactttaatgaaacctcatgtagaaaagattcaacactgtctttggcaagctattttataaaatcgattaagagactttcctggacacacatggatttagctcccctcagcaccctaatagtagacccagaaaggcgtttttgctcttctcttgaaaggcagtccctgaactcccgtgcaggtcacaaacttgggtcccacggagccacggcccagccactgggatgtccacctgccccagccaggcagtggcccctcagattcctggatgcatgaactgtggccccacgccagctgccctgtgcccgttctgttctgtggcacgtctgtgaggcagggcctgatgccaccgtgtttgcttcctctggcagcggtggacggtgaggagggctggtctccgtgggcagagtggacccagtgctccgtgacgtgtggctctgggacccagcagagaggccggtcctgtgacgtcaccagcaacacctgcttggggccctccatccagacacgggcttgcagtctgagcaagtgtgacacccgcagtgagtgtcgggcaggtgacacccgcgtgcctgtgggggtggggccgcgtttctctcagtcatcgggacctttgcaagggacagagctgccctcacgaggtgctgggcctttgcaaggattctagccaggtgaggctctttctcccagctgatgggaggggttctccttccctctcctcagcagctgtgagatgctcctcggttaataaggcacaccgcttacaggcaaatacccctctaggcggcacagcctgatctctctccgcttcttgtgttagtccggcaggacggcggctggagccactggtcaccttggtcttcatgctctgtgacctgtggagttggcaatatcacacgcatccgtctctgcaactccccagtgccccagatggggggcaagaattgcaaagggagtggccgggagaccaaagcctgccagggcgccccatgcccaagtaagtacggtgaaggcggggccctgggtgggcgggcttgcaggcagctcacagtgagcagccacagctggagccgggatccggggtgtcagggcctgttccagcccagcccagccccagccgagcagcaaagggggctgccatcccgggcctggctcggtaatgaacccatcctttgtgattaattctgctcacctgtgctcagcgcaaacctcctctgagatagccccgtttcattccagttcaggacagactgtaattaaaggaagaatgatccagcaccgcagctctgtcatgggagtgagtgtggatgggggagtgagtgtggatggggagtgagtgtggacggggagtgagtgtggatgggagtgagtgcggacgggagtgagtgtggacggggagtgagtgtggatggagtgagtgtggatggggaatgagtgtggatggggagtgagtgtggatggtgtttatgggggaatgagtgtggatggggagtaagtgtggatgggagtgagtgtggatggcgagtgtggatgggagtgagtgtggatggcgagtgtggatgggaatgagtgtggatggggagtgagtgtggatgggaagtgagtgtggatagagtgagtgtggatggggaatgagtgtggatggggagtgagtgtagatgggagtgaatgtggagagtgagtgtggatggggagtgagtgtggatggtgtttacggggcaatgagtgtggatggggagtgagtgtggatggtgtttatgggggaatgagtgtggatggggagtgtggatgggagtgagtgtggatggggagtgtggatggggagtgagtgtggatgggggagtgagtgtggatggggagtgactgtggatgggaatgagtgtggatggggagtgagtatagatgggagtgaatgtggatggggagtgagtgtggatggggagtgagtgtggatggtgtttatggggcaatgagtgtggatggggaatgagtgtggatggggagtgagtgtggatggggagtgagtgtggatggtgtttaagggggaatgagtgtggatggggagtgagtgtggatgggagtgagtgtggatggtgagtgtggatggggagtgagtgtggatggggagggagtgtggatgggggagggagagtgtggatggtggagggagagtgtggatgggggagtgagtgtggatgggggagtgagtgtggatggggagtgagtttggactgagtagtgagtgtggacagagggagagtgtggatgggggagggagaatgtggatgggggagtgagtgtggataggggagtgagtgtggatggggagtaagtgtggatggaagtgagtgtggatggagtgagtgtggatggggagggagtgtgaatgggggagtgagttgtatgggcagtgagtgtggatgggcagtgagtgtggatggaagtgagtgagtgtggactgagtgagtgtggatgggcagtgagtgtggacggggagtgagtttggactgagtagtgagtgtggacagaggatgccgcagatgcacagaactgtgtctctctgaaatagcctttccctgcgtctgtgcagactagggtgtgagttacagagcgcttggcccaaagcatcaagggcttccccagggaggcctggctcgggaagtgcatggatgtgctgagaaaaagagggtgtgcagggattgccttcagctgtgctcacgcctcatgggaactgcctgtgaggacattcggtgtcataccaggcttctgagttgaggccaccctccatggcagagggacagcttggcgaggagctctgagcttctcggtgtaaatggtggtgtggggccgggcacggtggctcatgcctgtaatcccagcactgtgggaggctggggcaggaggattgcttgaggccaggagtttgagagcagcctgggcaacatagcgagaccctctctattaaaaaaattcttttattaaaaagaagaggtggtatgatttgtcttctggaggccaagagatcgcagcaaagccattggaaacactggcttctgagtcactcccggaatccaccattgcagcaggcgtagtggtgcgatcacgctctgacctgtagtcagccaacctggggagaaaccagtttgtggggctgtgtagggaacaccatgtcccacctgctcttccctctcactcagccaactcacgttctccaccccgggtcttgctctgagctccccctggttggctttccccgcagtcgatggccgctggagcccctggtccccgtggtcggcctgcactgtcacctgtgccggtgggatccgggagcgcacccgggtctgcaacagccctgagcctcagtacggagggaaggcctgcgtgggggatgtgcaggagcgtcagatgtgcaacaagaggagctgccccgtgggtgagtgaggggtagaagcgggggcactgaaacccgggcttccattctgatgaaaagcacaaacgctttgggaaactagatgaaaaacacagaaaagaaaaatcaattttagttgcacacgcaaagataactacttttaacatctgtgtttcagtcctcctgtatttctaatgtaaaaacaaaaaagatgccaggtggcgtggcctgtggaatgtgggtagttgtgtggcgtggaatgtggtgtgtgggtaattgtgtggtgtggcctgtggaatgtgggtagttgtgtggcgtggcctgtggaatgtgggcagttgtgtggcatggtatgtggtgtgtgggtagttgtgtggcatggaatgtggagtgtgggtagttgtgtggtgtggaatgtggtgtgtgggtagttgtgtggtgtggcctgtggcatgtgggtagttgtgtggctgggaacatagcatgtagatagttgtgtggtatggaacatggtgtgtgggtagttgcatggtgtggactgtggcatctgggtggttgtgtggtgtggactgtggcatctgggtggttgtgtggtctggaatatgtagttgtgtagtgtgaaacgtggcatgtgagtagctgtgtgttgtgaaacatggtgtgtaggtagttgtgcggtgtggaacatggtgcatgggcagcggtgtggtgtgaaatgtgacacatggtagttgtgtggtctggaacgtggcatgtaggtagtagtgtggtgtgtcaccttgcatgtagttatgtgttgtagaaggtggtgcgtgggcagttgtatggtctggaacatggtacatgggtagttgtgtggtctagaatgtggcatgtaggtagttgtgtggtatagcacctgacgtgtgggcagttgtgtgttgtggaaggtggtgtgtgggcagttgtgtggtctggaatgtggcacatggtagttgtgtggtctggaacatggtgtgtaggtagttgtgtagtgtggaaggtggcgtgtgggtagttgtgtggtctggaacgtggcacataggtagttgtgtggtgtggcacctggggtgtagttgtgtgttgtggaaggtggtgcgtgggcagctgtgtggtctggaacatggcacgtaggtatttgtgtggtgtggaaagtgacgcatgggtagttgtgtggtctggaatgtggtgcataggtagttgtgcagtgtggcacctggggtgtagttgtgtgttgtggaaggtggtgcatgggcagttgtgtggtctggaaggtggcacgtggtagttgtatggtctggaacatggtgtgtgggtagttgtgtagtgtggaaggtggcacgtgggtagttgtgtgatccggaacgtggcgcgtaggtaggtttgtggtgtggcacctgacatgtagttgtgtgttgtggaacctggtgcgtaggcagttgtgtgttgtggaaggtggcgtgtgggtagttgtgtggtgtggcccgtggcgtgtagtcataatgtacacgtgcttctgcaacccgctgcactgtgtccacctgagcaatgcggtcttggagatgatgcctcttgatgatcatccagaatcacaccagagtgttcctgactacacaattcgatgacaaagacatcccagagtgtttgacggcccacagggcgggcttccttctgtgctgcgcagggcgcgtggtgaactctgctccgccttctcccacccagatggctgtttatccaacccctgcttcccgggagcccagtgcagcagcttccccgatgggtcctggtcatgcggctcctgccctgtgggcttcttgggcaatggcacccactgtgaggacctggacgaggtgggtgaccccgccctgggctgtgggcgccctgaggtcgggagcggcctctcatgtctgcttgtccccgcagtgtgccctggtccccgacatctgcttctccaccagcaaggtgcctcgctgtgtcaacactcagcctggcttccactgcctgccctgcccgccccgatacagagggaaccagcccgtcggggtcggcctggaagcagccaagacggaaaagcaagtacgcaaggccggccttccttgtgtgttgcgagcggctttggaaaaatcagatgagctcagaaaagcagcaggaggaaggagaggaaggggtggcgtggcccgggagaggcatgggaggggctggcccggggaagctgagcacctgctcggctgggccgctgctctccgcgcggggtgcggggcgtgctcagccgggcctgtgagggtcaggccgccacctctccgctgttagcgcagcccttggtgagctgcagccgaggctcagaaacgatggctgagtcacaaacggagcctcaggaacgaacagcacctcaagtgcgtgtccagaaagcccttcccacttcaggacttgggtccgcttgggaccggacctgctggggcctgcggtgcccgacgccccgcctcgacgcctccggagccatcgtcctgcctgtcgctaaccccgcagcccttctccccgtaggtgtgtgagcccgaaaacccatgcaaggacaagacacacaactgccacaagcacgcggagtgcatctacctgggccacttcagcgaccccatgtacaagtgcgagtgccagacaggctacgcgggcgacgggctcatctgcggggaggactcggacctggacggctggcccaacctcaatctggtctgcgccaccaacgccacctaccactgcatcaaggtgaggcgcggggctcgcagggcacacggggccacggcggtcagccctcctcctggcgccggggacgctacgcggacggggggcgggggcagcacagggaatttggaaggagggtctctcaggcctcttgcctgatcaccaggttgaatgcatccccctggtcccctctctggaggtccttagtagacacaggcacactctggcgccgcccactgctgggcacagagaacctcgggcacgtcggcccatatttgcaattgcgcgcatcgttaacgcctgaaactgagcagagggaggacgccggctccacgctcggctccaggctgtgcagaggccattgtgtctcaggcaggtctggccaggctatgtcacttggaaagagttaggacatggttttcttcccaaagcccaagcgtgttgcagtataaggagctgctcagctggaagaaggagctccttcggggcccatcccaggctggactgctttcctgtggccgctggaacgaacaccacggcccgggaggctcacaacaacaggaatctgttatctcacagctctggaggcctgaaacacaacgtcaaggtgctagcggggccgtgctccctctgcttctcccagcttctctggctcaggcgtcgctgggcttctggcgctggtggctgcatggccctgacctctggtcggcttcacaccactttctccagtgcctttctctccggaaacttcctctgcctctctttgataagaacacctgtggttgtatttagggcccacccagataatccaggatgagcctcactgttcaatgtccttgacctaattccacttgttaccatacaagatgaaattcacttcagccatatcaggtgacatccccgggcgccaagacactaggacgcggacatccatcgtggggactgccactcagtccaccgcacagggtgccccaaaatgttttagtgcagttttatgccttaagaaggtcagacatggaaatgccacaaactgacacaaaatatcatttgaaaatataaatatattcatttatttaatatttaatcattcttgcaaattttgtgttaattttctctgtcagtcccgcttgattaaagatgccaaatactcactgaaacaaaatatgagtatgttttaaaatcaacgaggcactgatcccaacctatgttacaccccttggctacccagcctacccttcttgaagcccctgatttcagaaggtcagctgcagctgagtccgtgctgctagaagatatcccgattattctttccatcattgtggaattttagatggaaatttaataacttcgaaaatggtatataatttgcaaagttatatgtatatatacacatacacaaaaggatttaaaagtgagacttgacaagggacccctgtgcccgttcccatattaacccgacacacaggtgctggatcctccccattgccaggggcccccgtctgggatccgtgtcctccatgacaagcaacatgctctcctttcttaatctgtaagtgctgaaactctgggctccagcacaagaccccaggttctgtcttctgattcaacgagtgatgtgctttgagccacggggatgacacacccttggggctcttgtactgaaactgaaacggacacgctactctctaccttttcctggatttccaattccctcaagttgttagtgtctgcacagctcagctttaaattatggtataactggactgaaatgaaaggagtttttgcccaattacatgcattacccactcaccgtgaaaagctgagttagcagataatttcaagttctcagccctggtttctgaacatatcacatacatatttgaaagactcttttctttgagattttttgactggtgagggttaaacgtttataagctttggcattttgatttatgagctgaagtctgtgggaaggaaagcaccactaaagcctcttttctctcccatgttctctcagagcaataccttgtcattctcttcttgtttctgcagttgtttggcaacctcactgggattctgggctccgaacacaagtttcttttgtctccctcgtgagtagtggtgacataatttccagggcaggagttgagaagaaattcatgcgcttctggcctcctggctcctctctcagctcccgcttgagatcgaggactgatggggcacgcttccttcctcggcgccatgctggtttcatttcacctgcattcctgaaagaggcgctttcctaaatgtttttccaagtattcttccttctccaattgcaggataactgcccccatctgccaaattctgggcaggaagactttgacaaggacgggattggcgatgcctgtgatgatgacgatgacaatgacggtgtgaccgatgagaaggtaggagcagcttgtgccgcgcacctgccctgggttccaggagcagcgaggtccacaggaggccactttataccaaacagcccttgtcaacgtaactgccattgtcctgcaagcgtttgtgcataggcagttcccaaaggtcactataaagacagtcctttgcaaaagcggattttacctcagtgcatggggctgcccagggtgtgctgccggaaatgttttgaataattttttctattttaactgcaaaaaaatagaagacctcctctccttctgctgaggagccagtgatgggcaaggctgacaccaccatgagtgatagacttgcctttatggcaacatttaaaatattaccatttttctaagaaaattgctgcaaacacaaatggtttaatgtatttgtacacaaaacagctctagcaagaatagatcaagattttactcactgcttttttacatctgactttgatgggagacattgactcactaatccattcatttatttgatatttacatatctctcctcaccatgaagtgtatgatataccatttttgccttagcaatctacaaattttcaacaaaagacagatgcataaataatgataaaatgatttgatatggaaaaagtgtttggcgagggctaactctttttttttttttttttggtcgctcaggcttgagtgcaatggcatgatcttggctcactgcaatctccatcttctgggttcaagcgattctcttgcctcagtctcctgagtaactggcattacaggcgcacaccaccacgcccggctcatttttgtatttttaggagagatggggtttcaccatgttggccaggctggtctcgaactcctgacctcaggtgacccgcctgccttggcctcccaaagtgctgggattaatggtgtgagccactgtgcccgggcctaactggctttttaaagcactgggattaaaggtgtgagccactgcgcccggccctggtcttgaactcctgacctcaggtgatccgcccgcctcagcctcccatagtgctgggattaaaggtgtgagcctccgtgccctgccctgactggctttttgaagtgctgggattacaggtgtgagccacagtgcccagctgtgattaaaggtgtgagccaccgtccagccctaactggcttttgtgtttgtttgatttctatattgattttcatcaaccttgagtacataacttataagtgctaaacggcccgacacacattcctatgatcttcgttaaagtcttccctttcttggttttccaggacaactgccagctcctcttcaatccccgccaggctgactatgacaaggatgaggttggggaccgctgtgacaactgcccttacgtgcacaaccctgcccagatcgacacagacaacaatggagagggtgacgcctgctccgtggacattgatggggacggtgggtgcttctgctccttcccatgcgtgcactttttttttttttttgagatggagtttcactattgttgcccagggcagtagcaccatcttggctcactgcgatctccaccttttgggttcaagtgagtctcctgcttcagcctcctgagtagctgggatcacaggtgcacaccaccacgcctagctaattttgtattttaagtagagacgaggtttcaccatgttggccaggctggtctcaagctcctgacctcaaatgatccgcctgccttggcctcccaaagtgctgggattacaggcgtgagccaccgcgcccggcccaatgcatgcattttaagggtcgcaattggaggcattggcaagtttcatgttttattctgaattttgataagctcctttcatttttacactactataagattaaatgattcattcagttattcccatagggacccatgcttattctgccttgccttttcctgaaggtcaggggacaccagccacaggaccgccctagagaaagctatgcatttggtatcctcctctctctgaccccagccttgcagtcctgggcctcgtgcttcttcatggcatcttttctaatgttcacccttcattcaaaaattccaagaagccatttcatgttttcatcaaactgagcttctaggagttagaataacgtgggtgtattgtggttacctctgccactgatcccggttgctgctttatccggagagttcgctggccttggtaagcgagctctgcaacccagtgccactgtcaccgcatggtcatcccttctcttggggtgcctggagaccaggcgagtgcttctgtagaaccagcaagagctgggggcaggctcgcctccacgctggagctcggccccagctcctccacacttcgcctcgtggggtcctcttcccagcccggcgccagccaccccctttctgagccaccccaacctgctgttctgtctcacagcgggtttctcagtctgatcttttccactgatttctgcctccaccctcctctcgttctctgggaatgtggtgggttgctgtctgagggctcgtggtggccagggggctcctcggctccccatccaggatggcgtctgtgatgtgctggatgcagatctcaagctccagtcccttccatttttattttttaggtgttccttacttcccttctccagacctcacctgaccaaagcaaggcgagcgtctcagctcagttctggctcttcctgtggactcgctgccgtgtaacattttgctctgtcatttgtgacactgtcactgatggtattgtttagttcagtgctagtttatatttttgtaacttcagtatcaatgcaactcatcactttcagatttcttaagataagatatgacatctaaaaaccctgccactctctgccattgtttttttcctactcatgtgcatggatgataaactcctgggaactcaacacatactttccaagtgggtattagggagaaataagcaatttagcaagctcagatttacacggcgacagcacattcaactacccctcctgcaacattacccagaaatctccaaaagttggttctatttcaaatgaaaggtatttgaactgtaatgaaatatgtcatatgttcttctaaaatctaatagtctttatattttactatattcttaggcgtctttttattataattaaatagaagtgtggctgtaagcaatttcgtgtgataggaaaaacaatgtgctttttctaaactcacctgtccttctggtttgtttttgttttcttccccctttaaacacttacagatgtcttcaatgaacgagacaattgtccctacgtctacaacactgaccagagggacacggatggtgacggtgtgggggatcactgtgacaactgccccctggtgcacaaccctgaccaggtgagggcagccgcagacaggcggggttggaggtcctcatcagagggacgcggggacggtggcggtgtgggggatcactgtgacaactgcccctggtgcacaaccctgaccagatgagggcagccatgggcaggcgggtctcaggtcctcatcagtcccctccatggggccttgggagttttccatgagctccacaaagacaggataacatggagttttcaatgatttcaattgaaaacatttattcaactcaaatctcagcactattcttgtatctcagtggccacaggccaaatgaatagacgccttcacctcatcagctggagcgaggttgtgtcttcacagaattctctccccattttcctgatgccaacataggaattggcttcatttccaggtttgcgtttgaaagagacaagggaggacagttatcttgatgcagctcataggatatattatcctatgatgtaaatggtgtaaatggcgcaaatggtgtaaaaaagagacataattacctggtagttcatgcttttccagcgaagaagcacatcttcctttagtgaagtgaattactgtggagaggtggcagagggtggagagattcctggaccgagaggcctggccccagtgcttgtcctgacgtcagggtcagtgtgacctcgggccagccgcccctgcgtggccctggggcttgtgctgcaggacgaggaggccggctctcaggcttgcgtcctgctggttcctctccacctcctcaaactggcagtcctctgctgtttctctcacgccccatcccctagaccgacgtggacaatgaccttgttggggaccagtgtgacaacaacgaggacatagatgacgacggccaccagaacaaccaggacaactgcccctacatctccaacgccaaccaggctgaccatgacagagacggccagggcgacgcctgtgaccctgatgatgacaacgatggcgtccccgatgacagggacaactgccggcttgtgttcaacccagaccaggaggacttggacggtgggtgctctctcagctcatgggcgtggaggaaaatggcttctgagcaacccgccagggcagagatatgtatgcacggagatcatcttaaatctgctgctggaaaaagggcaatgactttgggcctcttaaagctgtgggtccatgcaatatgagtttcttctcccctgacactcaacacattcttggctgtgtgtgtgcccttcaacaggtgtgctgcctcaagtgtgtgtgcacgtcgggaggaggagaaatccctgcctccatataacttccagattgttgacgatctcctagaaagaatgcgggttacgaacgtaggatgaattgggaatttggtgtatggggccaggcaggggacaaggaggatttttttgaaagcaaagccaacaaaagtggcacgagtgtgaagcatgagaggaagagctgctttgctcagcagtgagcatgaataggtggcccatagccacgggggcccaaggaaggagctggatgggctgcagtcctctaagtcagcgtccctgagtaataaacaagggcacagctgtgctctggggcttccggggaggctgtgagaaagtggccctcacttggagtggggcctggctgacacaggctctctttggaagccacgtccttgacagagggagataaggacttgaggggcatctgagacagcatgactcagaagtacgtgggagatgctgggatcagaagggcagctcctgtgttctccccgagcagcatgaagggatggagtgagcacagcaagcctcatctggactccgtgttcgggcatgcaggggcttgctccccatgcagcctttccccagggagggactgggacagagagaagctgataggcagagcagcatttcagcatttcagaatgccctgataccaactatgtgcctgccacgtggtagctggagtatgttcttgaacagaacggaaactagttgaagaatatgatgagatattcaatccaacttgcctttcctccaaaacggcaggccacgtgatagctaattcagtacattgcaatctgcctgtcaggttatcgtcatcgccgtagactgatagactggacacatgtggcaaattcgtggtccccctgtttgcaccaggcccacctcatccccactccccaccatgccacaaccccgctgaaaacttgacaaggacccactaaacagcggaagtccatgtctccctaggaaaaaccattttagtgtgagttccgctttaatgccaaatagactataaaaggcaaggatgactaagaaaagtaataacagacattcagaaaactatccaaacacaaagctggaaatgcaggttgatattacttgacagccattcaggttttatacctgcagcattgagtttggaacacggtgagaaatggctttatgtgaatttgctgtgctggcctttgctgtgtatttatcacaaaaattttgtgaaaagagttgaggttcctgtgaagtcaaatgttttggagattgttgagcacgaatccacaaaacactgcaaagcactcagtcttagatgttctgggaaagatgcactcatgtttctcagacacggaaaagcaaatggcaaaccaccgaccaccgactttgcttctttgtttttgtttttgtttttgcttgttctttgtgcataggtgatggacggggtgatatttgtaaagatgattttgacaatgacaacatcccagatattgatgatgtgtgtcctgaaaacaatgccatcagtgagacagacttcaggaacttccagatggtccccttggatcccaaagggaccacccaaattgatcccaactgggtcattcgccatcaaggcaaggagctggttcagacagccaactcggaccccggcatcgctgtaggtgagtctctgagacacggcggtggtgccagcatttctccgggggaggcgcccacagaagatgcagactgcactttaagatcatgcaggtgggatgccatgtggtctttctggaagcccccatccttccatggtctgtgaaactgtctgcctaaataaccttgacaggtacatgcacctgccgctctgaagtctctgaaatttcagtaaaccattttattttatagacttggtctatgaaatgggacctcataatcctctcagaactcttgtaagttggatctaaaagaaataccttcaattccactaatctcatggtaaaagagcccatcgggatgatgaggggagcccgccctgcctgctgggcatccactgtcagatggtcacagggccaagctggggattgcctgaaacctgtttcttttttttttcttttttttctttttttttttttgagatggagtcttgctcttgtcccccaggctggagtatagtggtacaatctcagttcactgcaaccttttttccccggttcaagtgattctcctgcctcagcctcctgagtagctgggattacaggtacccaccaccatgcccggctaatttttgcatttttagtagagacaaggtttcaccatattggtcagaccagtctcgaactcttgacctcaggtgatctgcccacctcggcctctcaaagtgctgggattacaggcatgagtcactactcccggccacctgaaaggtgtttctaacgaaaccttatggcgttgcatccaggttttgacgagtttgggtctgtggacttcagtggcacattctacgtaaacactgaccgggacgacgactatgccggcttcgtctttggttaccagtcaagcagccgcttctatgtggtgatgtggaagcaggtgacgcagacctactgggaggaccagcccacgcgggcctatggctactccggcgtgtccctcaaggtggtgaactccaccacggggacgggcgagcacctgaggaacgcgctgtggcacacggggaacacgccggggcaggtgaggttggctggccaggcccacacatctcctctgcaccactgtggctgcagagtgtttcagcaggactagcccagtccagagaccccacttttgtctttattaattttaactccaggcacagttattttaataatcttactttattatagacactgtgcctggggttacaactcaacacagttgataattaccagttaaatacagttgctaatccttttacaaattaaacctcttttaccctcttctggagatagggagtgagcataggacataatgatcaaagatataatatgaaaaaaatattttaaaaattgaagctagggagaattgaatatcaaaacttcaagaattttgcccaacatcccatatcaaggaaagagaagatccagacatgaacccaggaatctgaggatcaggtgcctgggctcttcaatccaggaatctgagggtcaggtgccttggctctcagccctgagccacactctgtccatgggcttcaatccacagtagagatttggatgataaacacatcagagagatatggagcaccatgagccttaagcatgaacttgcaaagtcatgtttttgcttcctgcttggtgttacagagctgtggttaaggctccgggtgcccatggcactcaagagtgctatgttctctctcaggtgcgaaccttatggcacgaccccaggaacattggctggaaggactacacggcctataggtggcacctgactcacaggcccaagactggctacatcaggtgagggcaggtcagcacagctgcatttcttccaaggggcttcccatcggacggcacatttgaacattaatagacaaataagctcaagtgaattctaactttttgttttactctggattcttcgtcattaactgctttctcttttctatcctgcatctctactaaatattaagtatttttaaaaaatggttgaaaaggagaatatacaatctgctttgttttgggatgataaccatattttctcctaatgaataccccaggcaggggagaacacctgcaattaaaataactgcatctttgcagaattagcatgtgctttattggagactagatttgtacctgatataaatggctgaatttaaaacacggttgtatgaagttttgacacagttagcccaacagaatcttttcccttggcttaacagtatttataattgatttttattcaaacaaaatgtggtcaatttaaaatcaaggtgtttttgttttttcaaagttaataagcaccaagatcaggctggactctgcacagatgccaggagtgtgtgagtccctggcaatagagggcagatctgtgtgggtgaagtgcaggctcgtggcctcgctggaacgtttccctagggggcctcctgtttattcatattgatgccccatcctcctgtcgggggcttggtgtatccagtcctgctcccacgcagcttccacagtggggaggagagccggtgagctcatggttttagcacaaggtgaagtagggagagtccggtgcatcttcccaggaagtgggaagcttcctcctcaccccaccaaaggtagagtctcctctaaagcccttgcctgggtgactgtaagtgaactcacagattgtgacaatagtgtggttgcaagaaggaaggcgtgccctggatcagtgctgcaccaggggtggctggagctccaaaggagaaagccagcaatgccccctggggcactgaagccctgggcggagtatccacagcttgtgtccggagccaaccttccatcactggtgaatgcttcacagagttcatgttgtctttctttcctcttcttctttttaaacaccatttttagagtcttagtgcatgaaggaaaacaggtcatggcagactcaggacctatctatgaccaaacctacgctggcgggcggctgggtctatttgtcttctctcaagaaatggtctatttctcagacctcaagtacgaatgcagaggtgagtgtgagcacttcaggttagtggggaaggcatgtggcacccagaaagggaaaggggtacacagtgcgctcttccacttacaaaagctgtacatcagggcaataaacctaatgcacaataccacacatgagccccctgcacattccaagcagccatttcatttggtcagcttggattgttttgtttttaattgcatttggatgcctctggtagaacactttccaattatttacaggtcccacccatcctcattgtgccatagcctagagtttcctagatttcctccacttccaggctcctgacgccattttagattggtacccttgcattagcaatggcaggcaggcaggaaggaaagaaggaaggaaggagtttctctatagttatctcgctacaggtatatttgaatcaaaatattatagacctggaagataacttgaattccatctgctctaattccatgccttcaaatgcgcattacccttccacagatgcagtaaataaggctcaggatgcttctcaagaatcacacattgaaaatcatgtgtttggctgggggcagtggctcatgcctgtaatcctagccctttgggaggccaaggcgggtggatcccctgaggtcaggagttcgagaccagcctggccaacagggcaaaaccctgttggggttgatttatctgcttgcttctgtggaggttttcttctccttatgttaggatgtctttcaaggcatctcatttcctcccatccatccatatcattcatccacccacccatatatctcatccatccacccatccatccatccattcatccacccatctcatccattcacccaaccatccatccatccacccacccacacacccacccatctcatccatccaaccacccatccacccaactatctcatccatccatccatccacccacccatccacctatccatctaatccatccacccacccacccactcatccatttcatccatccatccacccacacatccacccaaccatttcattcacccccactcactcatctatcccatccatccattcatctcatccactcacctacctactcatccatccatccatccacctatcaatacatccatctcatccatccatccatccatctcatccacccacctactcatccatccatccactcatctcatccacccacctactcatccatccatccactcatccacccacctactcatccatccatccactcatctcatccacccacctactcatccatccatccactcatctcatccacttacccacccactcatcatccatccatccacccagcacttatccatccatcttatccatccatccatccatctcagccacccacccatgcactcatccatctcatccaccaacccactcatccctccatccacccacccacccatccatccatctcatccacccacctatctcatccatccatccacctgtctcatccatccatccatcccatccatccatctactcatccgcccatccatctcatccattcacccaaccatccatctcatccatccatccattcatccatccacccacccacacacccacccatctcatccatccatccacccagccccatccacctatccatctagtccatccacccacccacccatccatctcatccatccatccatccacccatccatttcatccacccccactcatctatcccatccatccatctcagccacccacccacccactcatccatctcatccatccacccacccatccatctccaccaacccacctatctcattcatccatccatccatcaattcatctcatccacccattcatctcatctaccaacccactcatccatccatccacccacccatttcatccatccaccaatccatttcatccatccatccacccatccatccatctcatccagccacccaaccatctcatcatccatccacccattcatctcatccaccaacccactcatccatccatccacccactcatttcatccatccatccatccatctcatccacccacccaccccatccatccacccatccatccacccacccatttcatccacccacccatccatttcatccatccatccatccatccatctcatccacccacccaccgacccatctcatccatccacccacccatctcatccatccacccatccatttcatccatccatccatccatccatatgatagatctcatctttaattaaagtaattatatttctggttctaggtaaaacaaaataaatcactacccatggcccagttatgctaattgtttattgcttttttttttctttttgtagatatttaaacaagatttgctgcatttccggcaatgccctgtgcatgccatggtccctagacacctcagttcattgtggtccttgtggcttctctctctagcagcacctcctgtcccttgaccttaactctgatggttcttcacctcctgccagcaaccccaaacccaagtgccttcagaggataaatatcaatggaactcagagatgaacatctaacccactagaggaaaccagtttggtgatatatgagactttatgtggagtgaaaattgggcatgccattacattgctttttcttgtttgtttaaaaagaatgacgtttacatataaaatgtaattacttattgtatttatgtgtatatggagttgaagggaatactgtgcataagccattatgataaattaagcatgaaaaatattgctgaactacttttggtgcttaaagttgtcactattcttgaattagagttgctctacaatgacacacaaatcccattaaataaattataaacaagggtcaattcaaatttgaagtaatgttttagtaaggagagattagaagacaacaggcatagcaaatgacataagctaccgattaactaatcggaacatgtaaaacagttacaaaaataaacgaactctcctcttgtcctacaatgaaagccctcatgtgcagtagagatgcagtttcatcaaagaacaaacatccttgcaaatgggtgtgacgcggttccagatgtggatttggcaaaacctcatttaagtaaaaggttagcagagcaaagtgcggtgctttagctgctgcttgtgccgctgtggcgtcggggaggctcctgcctgagcttccttccccagctttgctgcctgagaggaaccagagcagacgcacaggccggaaaaggcgcatctaacgcgtatctaggctttggtaactgcggacaagttgcttttacctgatttgatgatacatttcattaaggttccagttataaatattttgttaatatttattaagtgactatagaatgcaactccatttaccagtaacttattttaaatatgcctagtaacacatatgtagtataatttctagaaacaaacatctaataagtatataatcctgtgaaaatatgaggcttgataatattaggttgtcacgatgaagcatgctagaagctgtaacagaatacatagagaataatgaggagtttatgatggaaccttaaatatataatgttgccagcgattttagttcaatatttgttactgttatctatctgctgtatatggaattcttttaattcaaacgctgaaaagaatcagcatttagtcttgccaggcacacccaataatcagtcatgtgtaatatgcacaagtttgtttttgtttttgttttttttgttggttggtttgtttttttgctttaagttgcatgatctttctgcaggaaatagtcactcatcccactccacataaggggtttagtaagagaagtctgtctgtctgatgatggatagggggcaaatctttttcccctttctgttaatagtcatcacatttctatgccaaacaggaacaatccataactttagtcttaatgtacacattgcattttgataaaattaattttgttgtttcctttgaggttgatcgttgtgttgttgttttgctgcactttttacttttttgcgtgtggagctgtattcccgagaccaacgaagcgttgggatacttcattaaatgtagcgactgtcaacagcgtgcaggttttctgtttctgtgttgtggggtcaaccgtacaatggtgtgggagtgacgatgatgtgagtatttagaatgtaccatattttttgtaaattatttatgtttttctaaacaaatttatcgtataggttgatgaaacgtcatgtgttttgccaaagactgtaaatatttatttatgtgttcacatggtcaaaatttcaccactgaaaccctgcacttagctagaacctcatttttaaagattaacaacaggaaataaattgtaaaaaaggttttctatacatga

SEQ ID NO: 12 - DNA, 25543 bp, Homo sapiens
taacatttggaatgagggtgtgagcaactgcaaattcccatctcccttctcattccagcctcattgtaacacacattctacgcctagcctggctttcttgctctccctcatctcattgtttcagcggaggccaaatctgaagtcctttccagggagtggctctgttcatcttattcgccagccaaagtaggaacagcgtaagaggagagagacacattcagcagccaaaggactcggtggaaagagcagaacaccatagacagtgagttatttgattacctgaaaccctaaagagacagagggaatgtgtgtatgtctgtgtgtgtgtgaaagggctggagggggcaatggggaatgtcactgaacttagtcttgagcagacctcccaaataaccgtggaattctgatgaaggagacgccaagatgagcagatgatatgaaaaagtcacgcatatgagaaaggaagattccacatcaggggtgaaagaggccaaagggtagggccaagtacggaccatgtagaatgtaaaatttcctctgacttggtagcagagaataataaaagcaagaataatggtaagtgaccaaggaatagatttgagggagaaatgaatgttgggtgaaaggtaagaaaagagagaaagggtttgagtcataagggaaaatgaagaaagttctgggaagacaaagagacagggacctcagaggcatctttccctggcactgaaatgctgatgtgcctctgagcatcacattctctgctatgcccaccacccctatagatatgtcgctcttgggacccaaggtgctgctgtttcttgctgcattcatcatcacctctggtgagtcctttattctttgctccctaaaccctcagctcctcagctatacacgtgtgtggcaggagatgggatggaatgaggtcgaagaggaatagcagtagagatgcttggtattgagctctggaattcctattagaagaacagattttgtgttaagaaaaaaagttcaggaatgtgactagacttcagactaggggaaaggcctcccaagaattatgaaactaaggtgcaactaagatacacacaaatgcatattaaccacccaaagagggtcacatatgagtaaacaaattgcaaagcaaaaaagaagctgatatacaaatgcatacacaaacatagaggagggactacctagaaagaaactggacctgggctgggcatggtgggctcacacctatactcctagcactttgggagactgagtggagaggatcactgagaccaacctgggcaacatagtgagatgagttaacctcatctccattaaaaaaaaaaaggaaaaaagaaaaaaagaaactggaccaaatgtaaatcttgaagaagaacagtgggaatacatacactattaccatcatgcatgcaggtatactcacatgcatgcaaaaaatatatgccatactgacacacaagagaaaagtgatcttcacagatttcccagaatctggctagaagactggccacagaaagtgaactttaggctgtaaagatgtcctactctatttttttccctccttcttccgatacagattgagaaaaataattcttctgtcttgttcactagcatagctagcggggaagccgtggggctagaagggctgccaggcctctcagtggagctggacttcattcctggccaggaatgagggtaagagggcagcagggctttgttctcaggaacttgtcttttttttctttttaccaaacaaatgcacagcagtgaaggaacttgtctttctgaagtctttctattcctattggttttgttcatagcactaatggtctcagtaattttatattgagctatataggaataagtcacaaagataaagtataaccatttctccatgattttctgatttgtctcataaaagggttacgaggtatagagctgcagtcactcacatctcttttctcttcctttgctatagactggatacccctgggggtcaatagtcaacgaggaggtaggtgaacccttggatagcggctctgttggggttcttatcaggaaaatttagatgaacagagttaaaaaatccttcctgcttatctatcgctgccaaaaaaaaaaaaaaaagaatatttcctacaacaaagagatgcattgccaaagtgtgagaaataggatcaacttcaccagtttccacaatcctattatcccattcataaaagcttcttgtgtgtgtgtttttaaactactgaaacaccttcccaagacatcctctatgaccatttctgttttcatttttctttacacatctcctatcttactcagaaaatgcttactagtccttacaaaaagcgttccttaattcatgtaacagtggaaaaatgaaagacaggataagaagtcatcttatacccataatcccagcactttgggaggctgaggcaggaggatcgcttgagcccaggagtttgagaccaaactgggcagcacagggagacctcatctctagaaaaaaaaaaaattagcctggcatggtggcgcatgcctgtggtcctagctactcaggaggctgaggcatgagaatggcttgaacccaggaggctgcggttgcagtgagccatgatcatgccattgcactccagcctgggcaacagagtggaactgactaaaaaaaaaaaaaaaaaattagaaaaaaagaagtcatgtcaatcctaggtgaaattgtggcacaactgagcaaaacccaaaaggtattttttggtttttcagctttttaggtaatttttgctcacaccattctctataacaaaaatcccaaaagttgtgacccctagaggaccacttccttcgacttcatgaagaaaactccattctgcctcaaggcattcaacataattataatttatctctttatttctcccatcccaggagagttagaggacagagcgctccagtaggcaacctattaatgggatcatgaaatcaatttagtgggtcacaactggtattaatttttaaaatgaattaagatagaccaaaacaaatataccgggatgcattgcatgtgttttgcaagagtaaagtattatttcatacaactttaataaaacttctcttagttttccatatgtatataccagggtacagtatatttttcttgcagtgggtcctggtacagaagataaaaatacaaaaattttttttctgttgttggtaaaaatacccgaatccccgagtttctgaatctaaatctgaatctaggaaaaaagggcaggaatgtgactagacttcagactaggggaaaggcctcccgagattttagtaccagcaaaactgaaaatcggaattcatttttctgggctgattaggaaccagtcctgtgttaagactttagatgcttttctcgcagacatatcataaggtatgatgaactgtcttgcctggtgtggtggctcatgcctgtaataccaagcactttgggaggttgaggtgggatgatcacttgaggccatgagtttgagatcagcctgggcaatatagtgagacccttttattttttttttttttcgagacagagtttcgctcttgttacccaggctgtagtacaattgcgcgatctcggctcactgcaacctccatctcccaagtacaagtgattctcctgtctcagcctcctaagtagcttggattataggcatgcgccaccacaactggctaattttttgtatttagtagagacagggtttcaccgtgttagtcaggctggtcgcaaactcctgacctcagatgatctgcaggcctcggcctcccaaagtgctgggattacaggtgtgagccactgctgccagcctgagaccctatctcttaaaaaaaaaaaaaaaaaagccaggtgtggtggtttgctggttgtcctagctactcagaaggctgaggtgaaaggatcgcttgagcccaggagttcgaagctgcaaaggagctatgatggcaccactgtactgcagcctgggcaacagagtgagactctctcaaaaaaagaaaaggaaaagaaaatacgttaattttttttttcagagagaacttcatgaatactagataaagcatttatatggtgatagctcttggaacagttggttaaactgaggtatatgcagaaaagcagtactctgccctgaaatcccagagacagctaggatacattctcaagccctctgttcccccattgctttgctcctgtttctgtgagtggctggactggaatgtagctaggcctctagagaaagggaaccaggaaggattgggctacacccgggagaggctccactcctctcctgcagtctctggaatgattcaggttagtggtttttcaaatatcctgtgggattggaacagacttggattccttttgttaaaagattgttcttccaatcaatgacatcctacttaaaaaaaaaagtgttctgaaagaagaaagcccataatgagtgtgaaaggttaagaggcttttttgtcaagcctgatgaattttttttttggcagagtctcactctgtcccaggctggagtgcagtggcaagatctcagctcactgcaacctccgcctcctgagttcaattcattctcctgcctcagcctcctgagtaattgggactacaggcatgcaccacccatgcccagctaatttttgtatttttagtagagatgggattttaccatgttggccagactggtctcaaactcctgacctcaagtgatacgcatgccttggcctcccaaaatgctgggattacaggcatgaaccatgaagcccagccaaacctgatgaatttctatctggaatttagaaaacaggatgaggtaagcaagggaaattcctatgaaatgctttatttgtatttcaccttttttataattatccataactctgatatgctttataaaaatatttgttcccatcagatttacatttgacatttattaatagaatctgaagttaaaaaaagaagtcaggccgggcatggtggcttatgcctgtaatcccagcacttcgggaggccaaggtggttggatcacctgaggtcaggagctcaagaccagcctggccaacatggtgaaaccctgtctctactaaaaatacaaaaactagtcgggcatggtggcacatgcctgtgtcccagccactcaggaggctgagacaggagaatcacttgaacctgggaggcggaggttgcagtgagccgagatcatgccgccactgcactccagcctgggcgatagggcgagactccgtctcaaaaaaaaaaaaaaaaaaaaagtcaaagcaaactatgtgaatttgctgacccctagtgggtagaatggattatgaatataagctatttacattgaagggtaattgctgatggaatgtttgcttaatatttattttattgttattactattattttattcttattttttgagatagggtttctctcttatcacccaggctggagtgcaatggcgcgatctcagctcactgccacctctgcctcctgggttcaagcgattctcctgcctcagcctccagagtagctgggattacaggcgtgcaccaccacgccaggctaattttgtatttacaggaaactgtaaataatagcacttcctaaaaccagtggtctctactttaaaaagcaaaataacaaaacagcattaacatttacttttattttttaatttacatataaattatattgtatgtgtttacagtatccaccatgacattttgatagatgtgtataaagtgaaatggttactacagtcaagcaaattcacatatccatatcctcattagtttccttttttgtatgtgtataataagagcacctgaaatttactctcttagcaaacatttaaatatttagcaaacaggccaggtgcagtggctcacacctgtaatcctagcacactgggaggcctaggcgggcagatcacctgaggtcaggagttcaagaccagcctggccaatatggtgaaaccccatctctactaaaaatacagaaattagctgggtgtggtggcgggcgcctgtaatcccagctactctggaggctgaggcagagaattgcttgaacccgggaggcggaggttgcagtgagccgagatcgtgcgctgctgtattccagcctgggcgacagacagagccagactctgtctcaaaaaaaaaaaatatatatatatatatatatgtgtgtgtgtgtgtgtgtgtgtgtatgtgtgtatatatatgtgtgtgtgtgtgtgtgtatatatatatatatatattagccaggcatggtggtatgcgcctgtaatcccagctacttgggaagctgaggtacgaaaattgcttgaacccaagaggcggaggttgcagtgagccgagactggccactcacttcagcctgggtgacagagcgagactcttaaaaaaaaaaaaaaatcaatactaccttttatgaacactcctaagcatatcagcaaattcatacccaattatatcagaattatgggctgggcgcggtggctcacgcctgtaatcccagcactttgggaggccgaggggggcggttcacgaggtcaggagatcgagaccacggtgaaaccccgtctctactaaaaatacaaaaaattagccgggcgctgtggcgggcgcctgtagtcccagctacttgggaggctgaggcaggagaatgatgtgaacccgggaggcggagcttgcagtgagccgagatcgcgcccctgcactccagcctgggcgacagagcgagactccgtctcaaaaaaaaaaaaaaaaaaagaattatgaatgtcaaaatcacaatgcctttggtatatccgatttcattttaaataagtattgcaaagaagtcatcaatcgtttgtcattattgtaagcagtcaaggaaaaacatttgtgggatactcaactccgctgggcactatgcttcgcaatttaacttactggaagtgcaagggtggcagggagacagagaatctcagaaattgttttctaattttcttttcagacgatgtgactcaagcgactccagaaacattcacagaagatcctagtaagctacacttttgtttgtttgtttgtttgctgttttattggggatagataaaggatcatgtctacataaagaaaaataaagacttcagaagggttggagggtgctctgagctcatgcagagttctgttgtcaccttagatgccagcatctctgtacgcatgcccagtcttactctctcttccatttctttctgcgatagtccctcatctgcccgagtccacaggctttcacttcagcctttcttgcctcctttgagatcatcgtccccttatcctgctttccttagctacttttcctgactgcattttttcattccttgttatgtgtctttgcagatctggtgaatgatcccgctacagatgaaacaggtaaattttaccgcagttaaaaaaaaaatggcatggttcttgttaatattcacaatatttattccagctcttgaattcattctgtgcttttatatttgcttttgttttttgttattgttgtttgtttttgagagggagtctcattctgttgcccaggctggagtgcagtggcacaattttggttcatggcaacccctacttcctgggttcaggggttcaagtggttctcctgccttggcctcctgagtagctgagattataggcacccgacaccatgcctgactaatttttgtatttttagtagagacgggatttcaccatgttggccgagctggtcttgaactcctggcctcagcctcccaaagtgctgggattacaggcatgagccacagcgtccagcctgcttctatctttggatactgaggttgtgagagtgttgttcagtgacagtgctaattttttttttttttttttgagacagagtctagctctgtagcccaggctagagtgcagcagcacaacctcagctcacagcaacctctgcctccagcattcaagtgattctcctgcctcagcctcctgagtagctgggattacaggcgcctgccaccatgctaatttccgtatttttactagagatggggtttcactatattggccaggctggtcttgaactcctgacctcaagtgatccacctgcctcagcctcccaaaattctgagattacaggtgcgagccactgcgccccacccaggactaatattctttaaaaaaatttataattatttaattaattctattcccttatacataaaacacaaagccagacatagtcttccacctgccacggtatctccattctcccttttcttactctgccttgtgtttgcaatttgaagccctcctcatacctgctgttttgtgccttttcagttttggctgttttggctgatattgcaccttccacagatgacttgggtgagttcagatctgggacccccaggtcatcagggccattctaggctttccccagagcccattctggatagtgtgcagctgctgaaggatcctaaaaagacaggatgacagtttatggagcacatatttccagtagttcaattcaaattaatgacattgttgaacacctgacaaacaggaactgtgctaatctttctctcaaagtttcaagacttgatgggtaaaggcaagataaaagtataaacacgttttggaggataaagggtagaagaagtaatgctttgactgaattttttttttttttttttttgagacggattattgctcttgtcgtccaggctgcagtgcaatggcgcgatctccgctcactgcggcctccgcctcctgggttcaagcgattttcctttctcagcctcccaagtggctggaattataggcacctaccaccatgcctggctaattttttgtagttttagtagagatggggtttcgccacgttggccaggcaggtcttgaactcttgacctcaggtgatccacctgcctcggcctcccaaagtgctgggattataggcggctagattattttttaacaaatcattattgaaaacttgctactaggtgccaaggatataaaagtgaacaaaactgattttcttctactagacatcttttgtgtaatatacaagatagacaaataaacagataactttattcagtttcacaaaattcgataatcaggataagcaagagaagctatggaagacacagaaagagttcttgactaggttcggtgctgggggtgagaaaaggttttttgtggagggcacatttgactaagctgcttcctgaaagacaagtaaaagtgaactaagttaatagaagagggaagagcttttaggtaaggaaaacaatataaatcaaaaggtgtagggtggacacgaaaaccaaccagagagacgtttatgcaaggtaagattataattagatttgtgcattggaaggatcacaccccacttccaaaccccctactgtactcccagggcagtgtggaaaactgatttgaccgtgattgatcgcctggaacccggaaaaccagcagggccactgttgcagtgttcccagtaaaagatgctgccctgaatcaaggtagagatagggagaattaaatgtgagctataagggagaggggattgttgagttgacatccagttttctttttcttttttctttttttttttttttgacacagagtcttggtcttgttgcccaggctggagtgcaatagcgcgatcttggctcactgcaacctccgcctcccgggttcaagcaattctcctgcttcagcctcccaagtagctgggattacaggcgcccaccaccaagcctggctaatttttttgtatttttagtggagacggggtttcaacacgttggccagactggtcttgagctcctgacctcaggtgatccaaccaccctggcctcccaaagtgctgggattacaggcatgagccaccacgcccagccatgacatccagttttctagatgtggctattgggtggatggtggtctcattcactgtataacaactagaattagtgaagggaaagataattaagtctgttggatatacattgaatgtgaaagatctttgaaatattcaagaactcttccataaaaaggcagttggatttataggtctggagtttaggagagagatgaggttggaaatacaggtttgggaattatcagcatatacacctgcctagaaaccatgggatagatgagatctcataacacaggtcctagtattctatttgcaacacttccagtgacatttttcctggtaactcccctgactagtctattcatctaactccttggcttgttcttcattctgtgaataaggcccatgttaaatttgcccctaggttaggatgactctcattattctttatttatttatttatttatttatttatttattttgagatggagtctccctctgtcacctaggctggagtgcaatggtacgatcttggctcactgcagcctctgcctcccaggttcaagtgattctcctgcctcagcctcctgagtagctgggattacaggtgcacatcactacacccaactaagttttgtatttttagtagagagggggtttcaccatgttggccaggctggtctcaaactcctgacctcaaataatctacctgccttggcctcccaaagtgctgggattacaggtgtgagccattgtgcccagctgaccctcattattctttacccaacagcttctatcaagagaatttatgatgatgtatctaatctacagaaaataaattttctcttataaggaagagcttgtacaggataataatcttttctctgcttagctctaggaagaagctcctctgggcatgtaactctttgccttgtgttcctactaaatttgcttcttgtcaacaatacagagatactcacaatacaatgaatttctcaactctttagaaaggaaaggagaaaggaaaaaaatcccatcctgcctcctaatgtcttcaattttgtggagcaaatcagctcaataagggttttcttttagaagttgctaagagttattaattcatttgctccctatttatgggcactccaagcaggtcctaagtgaggcagtgtggcagttacagaagtagtaacttctagaattggtaacagtggaataaaatttctgcctttcagcctccctcagtgaaaaaaataccactgcaggtatgattgttgcttgcatgccttcttaagcctttttttcttcctgtggattccttacctccttgttctttggagggtacttggcacatcttctagtttacttccaattatttctcaaagagtattagtgttcttcactcccttactcttttttttaaaaaaatgagcacctgtcataaaagtcaaggggaaagaatggaacaaatgttgcatggtccccaaatagccctctccctaaagtacccttgcacattatgtggtggttagtggattgggaagtgaaatcaatttaacttcaaggactccatattaccacggaggccatggttaaaattgcatttcctaatgtactgataattctgatatatagctagggttgaaaactactggaacagagaaatagcaacctgcctaagaaatctgattctttcagaatgggattatcagcatttctattttattttactattttgttttattttattttatttttctgagatggagtctcactctgtcacccaggctggagtgcagtggcgtgatcttggctcactgcaacctccgcctcccaggttgaagtgattctcccgcctcagcctcccgagtagctgagattacaggcaactgccaccactcctggctaatttttgtattttcagtagagacggggttttaccttgttggccaggctggtctcgaactcctgacttcaggtgatctgcccgcctcgtccccgcaaagtgctggaattacaagcatgagccaccgtgcccagcctattttatatttcataacggacaattctagaaagactttattcctagaagtgctctcagagattattttatccacttctacttccaagtagggaagcgccaaaacttcatttagtcaattccctcttgctgtgtttttggtggacggaaaggatgtagcccaatttataatgattctctgtagagattactctgtatttttttcctactctatctatccttcccaattccttcaatccttcatttatgctgcttctatttggacctccttatttttttgtattgggcttcctcagagtgctgggatgagaaatttacctgcacaaggctctactctgtgcatcggccggttaaacaatgcattcatcagttatgcttcaccaggtaagggatcccagaatgcccaaaaagcatcttccatggtagtgtttctgtgttgataactatttaatgagcacccactatggaattgcaaactttgatggggccaaagtttttagcacaaccctcctagttattgctgaatgtaccaactagaacctggagtatgggctgaagtgtacaaagaacaggcagagtaatagaacttagaagggaaatgaaggtgggcgctggaggaagaagggtcatgagggaaatactggcatgctcaatttattacctgatagaaggagactgaagagaatggcccagctctaaggtagaaaatagtggggaggaatattaagcctgactttaggtagagtgtgcaaagtgtcactaagaagaataactaaaacaatggcctttgcaacaacttggatggagctggaggtcattattctaaatgaagtaactaaacaatgaaaaaccaaatattgtatgttctcgcttataagtgggagctaagctatgaggaggcaaaaacataagaatgatataatggactttggggactcaggggaaagagtgggagaggaatgagggataaaggctacacattgggtacggtgtacactgcttgggtgacgggtgcacccaaatctcagaaatcaccactaaagaacttatccatgtaaccaaaaaccacctgtacaccaaaaactattgaaataaaatttaaaaaacagaagagtaattaataccattccctcccctattttccagttggggggcaaaagtctgaaatacttaagaaaatacagttggggaaaagcagatagggaaagtggggaatatgagagttgaagaggcatcccagacccaggtgagttctcctctcaaggctttcttccatctccttccttgcctatgacactgggacgtctgcagtttacgacgtatgtacatcgtcaacaaggagatctgctctcgtcttgtctgtaaggaacacgaagctatgaaaggtaagatgatgtctggatgtttaatggagagaagcagttatgagaagggtagatagggacatgatattactatatccaaagtctggtactagaggagggcttcaggctacccccttagagtccatcagctcctgctggaagttatctcaaataaacaatctacataaagcagtatgcttgatatacaaacataaccctaagaaaagtacccctagatccctgtcctactagattgtaaccccacagtgtctcctacttagagagctttctgacactctggctattttaaagatcattcactggggttctagggaaaatttcaagtcagccattacagataatagactctgctagtccgcagccatgttcataactaaaaataaaacatacacacgcacatgcactaatttggagacagtaaggtttggatagggcctataaataaaaaatagatgggacatttagaaatcagctatgttataaatagttcaccaattccaagaacaatgaacatttcttactgtgacatttcaggtagaagaaggtagaaagatgttatggggcaattacgagggcccaaaatgtgtggttgtagaccatacatggtggaaacaaagatactctcaccttccccatggccagccccgaacgatggctgtggttggtgaaaacaccacagacaaagccatttctgactcagcagcccgctttgtgctgagttcctgagtaagagctgtagttaacttcgcagaaggaaacttgctgtgtgcccccattggctttgtgcaagccacctgcaagggaagcaccttgagattgaggatgggtatttgggactctaggcactttcaagtatctcaagggacttcctaaagttagctgtttgcccatagtaagcacgtaaatgtatactgaatgattggatctcatttttctatttaatagatccatgattagaagaattggcagctggatatataaaggaaactaacatttactgctcacctgtgctaggtactttgcatacatgatttcattttaatactcagaaatatactgttgaggtaggtattttaattctcattttacagaaagggatagtgaggtttataaaatttaagaaactttctaggaagtggcaaataactaaagtaagtggcagagctggttaaaacccggatctttttctctccaaccttttcactacaccacactgaaaagtcttctctatcccttaaaacaagagcctttgttatcttctgcattctcttcccatgatgttctgcttctcttctagatgagctttgccgtcagatggctggtctgccccctaggagactccgtcgctccaattacttccgacttcctccctgtgaaaatgtggatttgcagagacccaatggtctgtgatcattgaaaaagaggaaagaagaaaaaatgtatgggtgagaggaaggaggatctccttcttctccaaccattgacagctaacccttagacagtatttcttaaaccaatccttttgcaatgtccagcttttacccctactctctactttttcacccaaactgataacatttatctcattttctagcacttaaaatacaaagtctatattattgcataattttgctgcttctcaatatcatagacacagtgaatagatgatgactatatggcttatatacaaacattctatgtacaatttcaagggagactaaactttaggctaataatctttactattgaatctgtctgatatagatcttagggttgaagaagctatctttgtctatttgggctaaccatagaatttcatttattttcctcacaatattttcctagaccaactccccatcattcacgtgttcctctttactcttactttaactattttgctggcttgcccgaaaatttgcctggcaagtcttccttataagacacatcatggtaagttttgtagtcctgtaagattctgcaacacagtcaagaattatacaatcctactagcaatatataaggacccaaaatgtcttctgctaagctcagaggctggggctaaagcatgaggactatgccagctatagaacttggactcataattcgctatccaatttttcatgcagttgtctagtcgggaagtaaggttggaaactaagtctcatttactgattcgtttatgggtagtaccgggatgaacccaccaccacaaagcaaattagacaacttaatgtgaaatcataccattggttgacgtttccttgagttgctacttcgttcatcttcacaacttaacaagtgcacggtcgaattattgtgcaagtggcttttggatatcctgattggggcctaagaagggcattcagacttgaattttaataggcagacagaaagtttgcctaatagttaatacgaaagagtgaaagaaacacaatattcagacaacccacattcttatcctggctctagcagtaaccacgtagccttggataagccattttccttcattaggtcctggtttaatttcctcatctttaaaatgagaaggttaaatttatcttagtactgctgggcgcagtggctcatgcctgtaatctgagcactttgggaagctgaggcgggtggatcacttgaggtcagaaatttgagacgagcctggccaacatggtgaaaccccatctctactaaaaatacaaaaattagctgggcgtggtggcacgtgcctgtaatcccagctactcgggaggctgaggcaggagaatcaattgaacctgggaggcagaggttgcagtgagccgagatggcgccattgcactccagcctgggtgacaaaagcaaaagtccatcttaagaaatatatatatatattatatatattcttagttctaagatttcctttaattctatgattctctggatttaaatgcattattcatatttcttgaagcttagatacagtctaattcatagcaaccatatctgctttatcctaggtgagggtagcagtccacaatggaatagaagaaaatcccattataacaaatgacaaattatatatcatgaatccttctgtctgactaactcaataactttctataaaagccaatggaattcaaataggagctaggagacaacaagttatatatgacagtggaggttgtattccttttatattgctgagaaaactagttaaatgatcagattcttgctgttaagaaacaatttcgtttaatgggatctgtacaactgattttaaaaaaatgctacaaaaagccccaaagcatataatctctactccttacagtctctagaattaaatgtactcatttagacaacatattaaatgcatattttagccactttagagaaacctcataggcacagagtttccaagattaattttaagaatatcttcacgaacttgaccctcctactccacattgcaacatttccatcagacagcatttcaattccagtattatgtatattgcaaattaaacattttaaaatatttttttccaatttatttctcaaaataaaatgtcttttgttctggttctttttctcttctatgtttacgaaaaaggcctgaatttatgaacttttattccactttaaaaaatgtgtatcagccgggcgtggtggctcacgcctgtaatcccagcacttttggaggctgaggtgggcggatcacctgaggtcaggagtttgagaccagcctggccaacatgataaaaccctgtctctaagaaagatacaaaaaaattacccaggcatggtggcgggtgcctgtaatcccagctactcgggaggctgaggcaagagaatcgcttgaatcagggaggtggaggttgcaatgagccaagatcatgccactgcactccagcctgggcaacaacagtgaaattccgtctcaaaaaataaaagaagattcagaagaaagtttttactcattaaggtgttaatatattttttttcctggtgagcccaaatgacaaccttgctaagcaatggctttcaatgaaaagccattttttaaaccaaaataatggatctttaatgttagaattaaagaatttggtaaaaatatcagtagatattgaatgccctcctggtatcctgaatagatagcagcctcatctacctattcataaagattcacttttattttcccttctctaattgagttgattctactctgaggctttttccatattccatgcttacgattcaagaaaattctactttctcctcaaatgaacacattctggaaatttgagtgtgtcttctactcactaaatacagttctatgcacactcagtattgttttgactcatggcagagagtgcaaaccgcagctggtttcccaatttctgagtcttactttgatgacatatacagcagtatatgttgctagacacaagctcctcccttctctgcttcagggtacttgtggccaaagttagatgtttaactaaccactttacacctggtgagaaggcacaaacaacctctaagatccctcttccttttgtactgaagcagctgtaacacaatgaagaaggaaaacaatcctaaaagaagtgggaacaaagatggcaccagaccaggggatagccagatgagagagtgacaacaggctgacaccagggttggggagccaggaagctaaaagatggaaactgtcaaattccaaattcaaagggaatttgagaagtggggaaggggtcctgggggatctggaaacttagggtaaaacagaaagacatcaggagcacagtggaggagaggcaggactgtccttgtagctttgtcagctcagggaggccttacttaataaagcaatactctgataaaaacggaagcccttgtatctttgagcattttcaccaaccaaacatcagggaaagtgacttgttaagactgcggtaaggagaggaacaggtggccacagttttgttttctttctttctttctttctttctttttttctctaaaaaccagtcaagcagacccagaagcagcagtcagacgacaaattctgggcagaacccaagatggaaaaagcaaatgtttatataaatagaggtgcagagcccacagcttcctgttgacaaatcgaacttcactttacctcaaaccctcatttttttttaatagctgataatgatttggtgttatttttcaacttgtccaatcacttagagtaaggttctagtttattcctaacccttgggtcttgcagttcttttctctacctctggtatttttccctttcctctcccttttcctttctcctgggtacttacctggctatacatctgtactgtgtagctttatggagtgtttggttaaatttatgtaacaatccataggtattcaagatgatctcataaatttgtgggagatccaccttgtcttccctcctccaccagacaaacaaacaaacaaaaaccccaaaccaaaccagaatagataagttttgagcaagtataaggaaattcattttatggaaaataatctgtattatattgaagagattgatgggtgttaaggtatcaactgcatcactgtataccatttcctaatatgtggttctgtcccaaatgatcaaaaacaaggagttataatgaagggtaatgagaattgtacaaagaaacatttcttccatttgtataaacctctataaatccatctattcttgaaaatggatgagattttaggggaatggggaatgaagtagtagtaacacaaataagcaggccaggcgcggtggctcacacctgtaatcccagcactttgggaaggtgaggcaggcagatcacctgaggtcagaagtttgaaaccagcctggccaacatggcgaaaccccatctctactagaaacacaaaaatcagccggacgtagtagcagtaatttctctcttgtcatgtagaaactaaaaaaaattattacatcattgatatatgggatgtctagatccccaaatcaacatggttctaggtacaataaaagtgacacttggccgggcgcggtggctcacgcttgtaatcccagcactttgggaggccgaggcgggtggatcacgaggtcaggagatcgagaccacggtgaaaccccgtctctactaaaattaaaaaaaaattagcccggcgtggtggcgggcgcctgtagtcccagctactcggagaggctgaggcaggagaacggcgtgaacccgggaggcggagcttgcagtgagccgagatggcgccactgcatccagcctgggtgacagagcgagactccgtctcaaaaaaaaaaaaaaaaaaaaaaaaagtgacacttatcctgttcattttaatttcaaataattggtctttgtttcagtgccagtccagacttggcactcactagtggtatgatgccaagcaagtagcttctcagctgtaaattggtggcaacatacctgccttaggggtggttctgtgaattaacaagattatgtgttcaaaggtttagtaagactattaattaagacttattaactattaagtattagctattaactattaagtattattaactattaactattaagtaagacttattaattaattaataagactataggatttttttttttctacttaagctgattggtttctgttaaactgttcttgagtaggttggcttttccattctttcccttgtaacgaaacagatgaatcttgctggctagccaatgagtaggaaacttgcaaaaaatgtgcaataccagagatactagtttctctactgtttaaagtgtgtttaaatgtaccttttttttttcctcatacagatgggggtctggctatgttgcccagactagtcttgaactcccagcctcaagtgattctcccacctcggcctcccaaagtgttgagatcacaagaatgagccgctgttcctggtcctaatttaaatgtaattaaaattttttttttggccagactcagtagctcacatctgtaatcccaacgctttgggagaccaaggcaggagttcaagactagcctgagaaacatagcaagactgtctctacagaaaattaaaatactagccaggcatggtagctgcccctgtagtcccagctactgggtatgctgaggcaggaggattgcttgagcccacgaggccgaggttacagtgagctatgatggtatcactgtacaacagcctgggtgacagagtgagatcctgtctgtaaaacaattttttaaaagtaaaacttttttaaaagtggaattattccaaatgtggtctttggaactctaggacagcattgttatggtttgaatgtttgtcccctcccaaactcatgttgagttttaattgatgtggggtctttaagaggtgattaggggtcgggcatgctataatcccagcactttgggaggccgaggcagggggataatctgaggtcaggagttcgagaccaatctggccaacatggcgaaaccctgtctctactaaaaatacaaaaaattagccaggcgtaggggtgggtgcctatattccagctacttgggaggctgaggcaggagaatcgcttgaacccaggaggtggaggctgcagtgagtcacgattgtgccattgcactccaccctgggcaacaagagcgaaactctatcttaaaaaaaagaagaagaaatgattagggccgggagcagtggctcacatctgtaatctcgacactttgggaggctgaggcaggaagatcacttgaggtaaggagttcaagaccagccaactccagccaatatggtgaaaccccgtctctcctgaaaatacaaaaattagctaggtgtggtggtggatgcctgtaatcccagctactcaggaggctgagccatgagaattgcttgaacctgggaggcggagcttgcagtgagccgagatcgcaccactgtactccagcctgggtgacagagcaagactccatctcaaaaaaaaaaaaaaaagaaaagaaaagaaaagaggtgattaggtgatggcaaatcgatcataaatggattactgctgctgttattgcaggggtaggttagttatcacgagactgggtttataataaaagggagttttgcccgatttcttctctctgcctcaccagtttgcttgcacttgctgtccttccaccatgggatgactctcatcagatgatggcaccatgttcttggacttctcagcctccagaactgtgagaaataaatttcttttctttataaattactcagttggtgacagactcaataacacaaaatagactaaaacaacaacaacaacaacaactttttaataaagtgttctgtgctttttttttaaacaaacatcatattccctgtgtggtgggaagcagaagtattattattcatatttttcagacagagaaaaaggtttaataagacctgaccaagttcacacagttttggtgcggcagacccacgcctgaattctaaaactctaaaacttctcaaaggtctaaaagttctaaaagttaatccagttgcaaaaggaagactccaagacaaaggagtagtttacttgcttgccaaaggcttgtttgggaggctacaccttagaaaaactggaataaaaaatacaacctactgaaagagaaacaaattagattcctaaagtcactagacttactgtttatctgttcgtggtgggattttttattttttattttttatttttttgagacagagtcttactctgtggcccaggctggggtgcagtggtgtgatcttggcttagtgcaacctccgcctcccaggttcaagggattcttacgcttcagcctcctgaatagctgggattacaggcatgcaccgccacgcccagctcattgtttttgtattttggggtttcgttattttggccaggctgatctcgaactcctggcctcaagtgatcctcctgccttggcctcccaaagtgctaggattacaggcataagccaccacaacctgtccgatttttttttttttgtatatggttctcatatcctcaaagattattacccaccttcagagattgccattggcaaagtcagagtgcagttgtttgcatgacagagtcagtaacttatggaggagacttgaagattttatttattttggaaactagaactagaggctatggccctgcttgttttcttgcttacctcaaggtgtagaatgctttcatgtccactggatgtgaagtgctctcttattcagaactgaggcagagaaacttagtgtggtggttcctgcctataatcccagctactccacaggctgaagcaggaagactccttgagcccaggagttcaaggccaccctgggcaacaaaaggtgtgagagccttgtctcacaagcaaacaaacacaaaaacaaacaagttgagtcagagcacaggtgtctcttttgttttcacacatcacatacactccccaggaattctgtggagactcagccagtggctgttagctatgaatctggccagaaacaagaacctggaaaaggccaaagaggttccgatttttcctcttctcggaagggtagagaatcagtgtgtttactggctcatcagtctttctctttatcctgatttctttgactgactccttcaggaaggatagcctatgtgtcagagcacatactctggagctagactatatgggtgcaaatcctgactccacctcttctacggggaggaggcctatgcaaacctacccccaaaggctgagggagctgaaaggccagataaagaggcagacatgcccagtttctcagcaaaaaaaacatttaataagaacttaaaagcagaagccatgtcccaggcatctgcaagatggtggatccccttgctgttaccccaacccagacccagggcttacataccatagggaaagggcatccgtgcttcagaagggttgtgtaggacaattgaaggccacccctcagggaaaggcaagaatgctacctgaatcatagcctataatttgcttaagggcaggattcatagtaagtgcctgtttatgataacatcaaggttgttttaatctaggggctagacttatggtaaatatgtgttcttaacagtagataaagtagagatcttagaggtattactggaactgggggttaatcagaagtcaacgtggtgttttagcagccaagatggagttactttagcctccgccccaccattatgattcaaaccattctatgcctcacttttctcatctgtaaaagagatcagtgatacaaaacccttaaggctactgcgagattaaatgaattaagtggtttagggtagcaccggcacataggccctatgtaaatgtgagtgagtcattatcctttagtcaacaaacaacttttgaacaccaagtgcccagggcagtgctgggatgcaaagttaactaagacatggcctctgcatttgaagattaaattagagtcacttcttttttttttttgagatgctgtgtcacccaggctggagtgcaatggcacaatcacagctcactgcaacctctgcctcccgggttcaagcagttctcctgcctcagcctcctgagtagctgggattacaggcgtgcaccaccacgcccggctaatttttgtatttttagtagagacggggtttcaccgtgttggtcaggctggtcttgaaatcctgacctcatgatcctcccgcctcagcctcccacagtgctgggattacaggcgtgagccaccgcggccggcctagagtcactttattgctcaagttgtttctttctgcttttaataacaccttttgcctcctacaatgacattcattgtcttgttttcttttcaggtttttatcatttttgataataaaaaataaagtaatgctttaaattatactataaatttatcatgctcctgttcagggaaggcatacatctgctcactgcctttagttctcctctacacatctgctgcctagttttggccaagtgaactttccactgatatcctgggctctttcctcccattcccatatctgttctttcttctcctcagtcccagagcacttatcatttctgcaccccttatttatggactttctcctctgattgtacaaactaatagcatccctaaagagagaatagcccagtcattgcttgtttcttttttctggctattcagtccctagaagtctctgagtttaatcagtttttttttttcttctggggaaagagctttaatatcctggtacaccatggtgagcagaagcccaggcaaagcatctacacaggcaggtgtgtgtggttttgagcccaccaggtcccactttgtctcatcacagtccctccctaaggtgctgcctagaattctgcacaaacgttcttactcccaaagcacagggctttcttccagcttgcttttcgaaggaggcatttaaaccaggacaaagacagaagataaaggaacaaccaggcagagaggcagagacgctgacacagagttcggtttttactattatgtgtttggctgggtgcagaattgccctcaccacccctggccaccctggcctcctgggaggaacaggcagagatggctccagatggctcttggctgccactctaggcctcagggcttatacaatgagcacagcgggttccaccttccaataggaagtgcaaactctaattcacagtcagacttcaccaggagggagagatggtcttggctgaaggcactttaatcagggagcaaacccagtgccagggtttgtcttccttctcgttactctgataagtctagatgccactctgttggaaaaccagcactgcccacagctagggttagtgcactgactgagcgaagcatgagacctgctcactggtacaacttctcgttagggctattagcatggtcagctagcagctagcatggagtgaactgttttccataggcagcctcatacttcttgagccgggccactatcttctgggggccatacagagccacaaagcagaaaggccctccaaaacaaggcgggaagccaagcccaaagacagctgcgatgtctccctctgcaggtgtggccaagatcccctctcgcaggcacatgactgcctcattcacaaatcttgtcaccaggcgg

SEQ ID NO: 13 - DNA, 26302 bp, Homo sapiens
agtactaacatggactaatctgtgggagcagtttattccagtatcacccagggtgcagccacaccaggactgtgttgaagggtgttttttttcttttaaatgtaatacctcctcatcttttcttcttacacagtgtctgagaacatttacattatagataagtagtacatggtggataacttctacttttaggaggactactctcttctgacaggtatgtttcatgtctatcttacaagtatcgatgtatactttacagtcaatactaaggagacattaatgttattaataaatgcttataaataataggataaagtccaaagtttatctctataatttcttaaaaatcagcatttaaatacaaacctaaatttgtacctaaaattattctagttttatgtcttacctataatgaatgtattttaaatataattatgtgactttttttttcagctaagtgaaaacctgtcattatgccttaccataaatgttaacatgattgattttaaaagtcatctaaataaacatcttgtatgtttatctaggaaaataacattgctataataatgatcatgaagtttggggatatcacagctatattaaatgaaacagtaaatatatttttcaatatttaaaatattttctaatgtgtatttaaaatgtgtgaattactgaaatgtcaattttacttatacatttgaatattcatttttttccttgataaatgtcttccttattataatgaaatggcactgaaaagttcaaatggaaatctattcaattccaagaaagaatacttatcagcaatagtttagctagcactatattcaatatgaaagattaggaaattttcacagcatgtatacagtcagaatttaacactttcaaagatttcctttgtctactcccaaagtaaatttctgattaaattttagattaaaaaatttaagcaatgtattcaatattctactccctagtaatctaaatagcgcacagcattctttcatgttaatctattcagaggtgtggcacccaggaaacagtggccacatggtgtagggactgagtcataaagaacctgagggggttgtatttccctaaaaataaagttgtttaaatccaagaatcaagctgttaaaagaaagaaatgaaaaaagaaagaaaaatcgagcacaagcccacacacataaaaggatcctgatgtttttagtttgttttttggcattaaggagtatagtgtagtagtggaaagaacagaggatatatagtcttctgttacaactaactactcaattaaaaacaaatattctgataactgatctgaggtttgagacaaaaacaattaactttacaagcacaagtcttgaggcactgtgggaaacatcataaaaatggagaggcagtagattttgttttttaagacagtagcttgattgctagacatgtggagaaattaatgaagggcaaaattagtataaaaggaagaacagctagaatgctttgtcagaatgctagttatacttctaaggtaaaattaactactttttaaggaaagtgctatctttatcagtatccatgaacaaatggtactgtgaataagtttccaaatgcatgttggacttttaactcatttgttagcttacaagactatgccttgattacatctgaatttggtttggattccttcggtgaaatatatggagtatgttatatcacatttatatgctgaaatctgctactggtacctgtgaactgataggcatgtttaaacccaggggaaaagttgccaagcgggcctttaaacatgggatttaaaagcacagtgacttatttacctaataatagtgtctgagaggaaataccatttcacttagataaactttctaagtttgtagaccagttaaatggaaacaagaaagcttatgtgcttcttaagctttatttccagtccatatgttatgaactcttttaagaacttggccaaacctccttacctaggcttttccagaggaaagtctgtttactgtctggaagtaactatgagattaaaatccatttaggaggacatgcagtctagtgcaaagcacaaccaacaagcagtgaggaagccagccctcagctccaccacctccagccagttctggacgctcactgcctctgctttttctcagtaaaagagggccatggggggaaagtctcaaagacctctcttagctctaggctactatgatttattagtaatagcagtagcactggaagaatactccaaacactactctgattaagagagacttgaaaccaaaatccaaagctttccatgagtggaaaacactggcaaaactggtctaaatcagggaaatattgagtattcctgagaagaagatttaatatttttaaagggtttaaaaatagagtaacctgaatactgccaaaactaataaaacagaggttgtacctcattaataaactcaaaataaaacagccaaaagtcatatcattttaaatgacatataatattctctacattctttctgaataataagaaaaaaatactgctatctagggttctctcctagacattccattattttcctattggtaaacagttgcacactgaactgggggaggtttaggacctatacttgattgtacttattaacaaagcagtggaagagacccagcaagagactcaggtaaagagtgtaaataatgaattcctcatggtatcaaggttggcctgacttttttctttgcaagcaaccaggatacacaaatgcaaaagattagattaattgtaaaaggctaacagaagacagaactagcagagagaaatgaattttccagaaggcatttttgagtttccatataaagactttcctaacagccatggatggacaactgtggaagatgctgccttgaggtagtatcctctccctggagctattcaagcagggtggatatgctccctgttccagaatgttctggaaccttcaccaccaggaggaactcctgtttcaaaggtcttcatctcttattctccaggaaagggcctaactactatataaaagtggctgcctccactgctcagcaactggaatgcttcccaacagctaaagataatgctactgcctaaaacttgcaggcagaagtctccatttcatattttaattttaccgcagttttgattaaaggcagggagggtctcctgtaacttatcagtctcagaaagaggagagacaaaggaaggggccccggctgatgcttctcctgatgccactgggggactggtcagcagccctgaggcagggatgtggaaaaaagcaggaccactactgttctgctccctgccttccctgccctgtgtgccttctccttctcctctcaactctcagttctgctcctcatacctgatccagttcctcatctcgaacctcagctcagtactggggaagcctctcttgacggtggcacgaggctgaaggcatctgggaaaccattacgtggtgtgcaaaggagctgaggccagtccttgctcccgctgccaggccacaaggaacaccacgatgtgttcttggcaccccactttggatctctaacacattcctggtgttttactttttttttttaagttccatagtttttttgtttctacattttggatatattatctgttaaataggtttttccggtccagactgggaatctaaagcccatttggttcaaagattctatgggaaaaaacttaaactaaaacattcaggctgggtgcagtggctcacacagtggcacactttgggaggccgagatgggtggatcgcttaaggtcaggagttcaagacctgcctggccaacatggtgaaaccccatctctacaaaaatataaaaaattagccaggcatgatggcacatgcctgtaatcccagctacttgaaggctgaggtgggaggatcacttgaacctgggacgtggaggttgcagtgagccaagatggcgcaactgtactccagcctgggcgacaaagtgagactccatctcgaacaaacaaacaaacaaaaaaccccaaaaaaacaaacaaaaaagcacaatcaaccaacttaaaaaataaccttgtcaaaatcttcatttcccattgaccagaacaaataggattaagcctcaagaaattgtgaaccccaaaacaatttcccaagtaggtgctattgtttgacttttgggtagaaatagatgagaatagtgtgtatgagaaacctttgattacaccaattcctaccaaaagtggtaggaaaagacagcagtatatgcagaaataaagcaaagaaaattctgttggcggactgacatttaaaatattttaaaagcaacataattaagaaactatgcatgggaagaaaaaaaaaatgctttgcttataatcccattatccctcttaccaggtttgtacattctatttcaatctttttttcatgtgaatatatgtttttataaatgtctttagttctattggtctcaaacagtaaactgagggttatgcgtagacagacacggtgaagaattttactttcaaagctctgggtaccacacatctagtgttaaagccctacacccctgttcctaccccataagtcacagtatatacagtttacattgtctatttactaatccaggcattttattttttagtttttctattaatgtacctgacattcaagtgttaactttacgatctcgtattacctgacagtagttgattaggagttgcgggttttttatttttgagtagggaagtgtgggagagaagaggatggggaggaaggtgtgctctactttaagaaattcagcattctgacgagtgacactgcatggggtacagtgggtgcttggtaaatgcccactgaataactccagcaacctcaaagaaagccagaaacaggaccttaaatgacattataattctatagctccttgttgccaaggtcagacaaggtcaagggcagctatgcacctagaagacagagctgtaatgcaagaatgttacagaataaactggaatcaggggccaactttgatttagctaaggaccaagagctgaattttctagggaatgagtattttgaaggttgaggcaaagctgggcactaaaccttaaggagtcaggagccacacaacagccctaagtcaaaacacataatgagtcaaagttagacagacagcaaaggcacagagacaatgtgccagggacaaagtgatattgagaaggaagcccccagtaacctttaccaggaccccatacagcattcacaggatgactggaatacgaaacatcaacctgcctgccagcagggacaccccatgcctgctacagaacagtagtcagccacagttggtgatttccacctggggctctccaaaagaagccactgaaccctgtgttgccagcacaatctctcacccagtactacacaaatctgatcacacaatcattctgttctctaccttccaatccaagctacacaggtgcttctttatgtacagatgtgtacagaacagtaatttgtatactggttagataagaaaaaatgacagagtatgcccatgaagccacgagatttctggataaaacaactgagtccccccacatgagctggagcagaaggcagcacagaacagggagttgggacacatgagccctagctctggctccatttatatttggtaggtgactttgggcaagtcacttaagctctttacgcctcatttcctatgagggatgagtctagaataacatctgaattaacacctccacaaagtagtgtacagatgggaggctagggctagttttgaaattggaatcagcataggattattaaaatataaaaaactcttgccattctcagatctgtcctgtaacctccttcctagcataagttagtgtggattatcacaggaatatcacacatacctgaccagtgccatccagctacccagtgggcaaatgttcatgccaccatttagatttttggagcatatgagaaattaaataaagtaattatcaggttaataactaatgacagtaggacattctagccctcgtctggtgattaaaaaagacataccatatataaatgaagatatttattaagttaatgaattcattcttgatttttaaatccaggaaaaagcaggcccatggagagatgttaaagctgattttttggttctgggaaattgcaaccagttgggatttggaggggtaggtcttcccgaggctgggccaatcctggctgactatagaagtcttttgcagctcagctgctctctggcactcgggcaatggcaggcctggaggactatttaggtgactgtagcctggtggactattagggtctgcggagccctctgctgtggtggtgagtggatgccctcctgccaggactcagtttcaccagtgagcatctctaggatgcatctattttgaataatttcataatgtttttaatttttgaaattttcaaagaatatacacatttcacaggtaataatttaaaaattaggatatgtaaatatggcaataaatctatgctctgaaggttctcatttgtatagttctgttttgtgtgcattttaaaaatgcaactgaaaacaacctggccccccaaaaacaaaacaagcaaaccgaactcagtggaaagatgagtaagaaagaatagtctggacatcagacagtttggatcaaatattagacaatggaacagattagaaggaaaaagataccaattgtggaaaaagtgaccaactatgagagtgaggttgggaaaggtggagagaaatcagttaaggaaaaattccagatgttgtctaaggagacaatgaagatattcctccttcagggacactgaatacattaaggcaatagaaagattttgggaatacagagttaggtaagataatctgtttctgtttttacgatgtttattagctttttcattataaaggtaatactcattgctcattatgaaagttaaaggaaaaaggaaaacacaagtcatctatggttctagtgcccagagtttatcatcaatcaggtatattcctgccaggtttgtttttgtttgtttatgagtgtttgtaagtatacagtttatggattttttatatttgcttttttttatttcacaaaagataatatcccatatttaaaagtgtctttgcaagcattttgtgggttccaaaatatttcatggaataaatatactcttttattttactattcccctttaaccattatataattgtctcaaatatttctgctattataattctgtgatgaacatctttgtgcactttagaaatgtttcctgagactagattttaaaaagtagaattactatctgaaaaagagatatttttagagttcccaatgcacattgctgaattgctttccaaaaatctttataaatttactctcagattagctaagcaatggattaaaatgccatttcattgcactcttgccagaactgagaaatgtatatatgcaggaattatatccatttaaatttaatatcccatgtctgtttagtcctagactggtcttctacactaagacaccatgaaggagtatgtgctcctattattcctggctttgtgctctgccaaacccttctttagcccttcacacatcgcactgaagaatatgatgctgaaggatatggaagacacagatgatgatgatgatgatgatgatgatgatgatgatgatgatgaggacaactctctttttccaacaagagagccaagaagccatttttttccatttgatctgtttccaatgtgtccatttggatgtcagtgctattcacgagttgtacattgctcagatttaggtaagaatataagtcgattttgttttgaagaatagtaatgctattctgacaatttaaaggatggaaaaagtctcattgaaatttcaaaaataatctgagtgtataagtttttttcatttaagtttttaggtggaaagtacagcaaaccccaaagtacatccaaacttatttttaaaattaagaaaatcaaaggaaaactaagggaatgttgtccatagaacatttccttctcttccccagttaaatcaaagcatttaattttaattcccttcagagagaatggacatcacatgcagttctatctcagggtgctagcaggttgagactgtacttttcagtaaaactccatgataacaaaataagctgcatgtctagaacaatgaaatgagttatagaaagcttgtgaaatctctaatctagaccttttaaagataatgctttatttgctttttagcaatttgggtttaaaactgcctaagaaaaaagtggataaagtctttttaaaatttataattctttgctgagtattttatttctttaatacttctaatgaaggagcactcaagagcacagccatgtcccgttcaaggacgggacttaatgggaatgcatatcaagagttgttgccttcagctatttccaagaggggacagctgagactggccccactgtggaggccaaggtctggcacacaactcccactcaggggctgatggcccatcagggtcacttcatgagtctgtatgagcagatgtcttgaaaagcattagacgtgcttcctactgccatagcattcatggcaagagttaaagcttacaataatctactctagagaccttaatgaagtttgtcattatatgacaaaatgagaggcaaacaaaaagcattcagaaaaaggggagactaatacgagctagacttactagtaaagtctaatgaaataggctaggaaaaaaaatgggtcttaagctttacctgtggaattctcatgagaaagagattaagatgcaagtactgtttgagaaaacttgttcatgtagaacgactgtggaaacagcatcaggaacaagaaatgcagaagctgagacagatgctgggtgtgagaagaggttagttagggaatatgagaatgtactattgtactaaactgcatctcagacaagaaaaaacgttacctaccatcagtttgcaaagtgggtgcatgttaaagcactttgtaagtcaaaattccagataaaaatatgtgtatctgctatgactccaccagatgtaaactgggttagttctgggtaagatggtgaataaggacacatttatctttagtgcagaccacccccacgtgctggcctccatatgtgccacggcagagcagtcatatgcttccaacatgaagaccctgcatgagacattgcataaaactactccagaacacacttgtcaccaaagacttgagaagcccaagctacctcatggcaggaagctggtgttcccatcacacacagtctcccaaacatttagctttgaaaaaactctagtaaacaaaatccacctaagaatatctgtgacagtcagacatgccatcagcatgctgctgcacccatcctacctcccccaaaacgtgaccataaaaagggtctgggcacttatcactcttcctccctcaggagatgaaactcttcagaacttcagttttaacaggggcagggcaggagtaggtttgtcaaaatctgtgctaccaggaggatcccttctgcagaacctccagcttcctataagacttccacttcattttctaaaaccaaaataatatcctgtgttcataaaaatggcaaaattaatctattctaacaaacaaaactgcaccctaccttgctaattcatcaagttaccccccttcttcttcccatatagggttaaatttcttaagaaagtatcaattttattttagtattattattatttttttgagacagagtcttgctctgtcacccaggctggagtacaatggcgcgatctcggctcactgcaacttccgtctcctgggttcaagcgattttcctgcttcagcctcctgagtagctgggattaaaggcgcacaccaccatgcctggctaatttttatatttttagtagagacgaggttttaccatgttggccaggatggtcttgatctcctgacctcatgatccacccgactcggcctccgaaagtgctgggattataggcgtgagccaccgcgcccagcctatttttttatttttatttttgagacagagtctcactctgtcacccaggctggagtgcagtggcactatcttggctcactgcaacctctgcctcctgggttcaagcgattctcctgactcagcctcccgagtagctgggactacaggcacgtgtaacaatgcccagctaatttttgtattcttagtagagacggggtttctttcaccatgttggccaggctggtcttacaactcctgaccttaagtgacccacccacctcggcctcccaaagtgctgggattacaggcgtaaggcaccatgcctgaccaattttaaagtatagaaaggaaaagtacatagagctgtaggatagaatgttgatattcaaatactagattttcaattcttcaatttttggctattaaatgtatgactacacttcaggagtgaggacggttctatcaaaagtgtactgacatctaggccaaggcaggcatctcgcttgagtccaggagttcgagactagcctggccaacatggcgaaacgctgtgtctagtaaaaatacaacaattagccaggcatggtggtacacatcctagctactcgggaggctaaggcagaagaatcactagaacccaggaggtggaggttgcagtgagccgagatggcgccactgcactccagccggggcgacagagcaagactgtctcaagttaaaaaaaaaaaaaaaaagaataatatatgaatcagtatgtggaaatcaaagaatttacaactaattagagaagttaattacttaaaggaaatgggtggtaaagtttttggtaatatacatgaaaaaaatctaatttttccattttctaaacacaactatctaaggcttcttaaaatgatcaagacccggctgggtgcggtggctcacgactgtaataccagcactttgggaggcccagtcaggcgaatcacgaggtcaggagtctgagaccagcctgaccaacatggggaaacctcgtctctactaaaaatacaaaaattagccaggcgtggtggcacacacctgtaatcccagctactcaggaggctgaggcaggagaactgctggaacccgggaggccgaggttgcagtgagccaagatcatgccactgcactccagcctgggcaacagagcgagactccatctcaaaaaaaaaaaaaaagaaagaaaaattatcaagacccatatgctccaatttagcactataacagcctgaaaatttgcaaagaaagctaacattcctcagccaaaggtacatcaacagaagctgcacctcagtggttggtcaccttctcacagccactaaggccactccaatttatctccttttattccaccttagaggggatgagtagtgacaactataccaatctagacaccttgtaaaaattaataagttactcaaaaaggtcctgaggtcttcccccaaaacaatgttttttttgtcatctgttatgactgttaagtcatctgtaacttgatgataatcatgggttttaaaaaatgtatatttctaccatattagtaatctcatcttcagcatgattctctattatataatatgtttgtttctttctaaggtttgacctcagtcccaaccaacattccatttgatactcgaatgcttgatcttcaaaacaataaaattaaggaaatcaaagaaaatgattttaaaggactcacttcactttatgtaagaatatatcctcatactttcaaagatttaagtgaaaactctgtatctttgctataatgattaattatactatgttagtataaacaagtcttacttttctgtaaagaatgacaaaaatccctgcattcaacagcgttctagtcaattaaaaattatagatttcattcaattaatagtctaattcaatggatgtttattaaataatagccatgtaaaatgtagtgggctgagtttaatggtcctcaaataagcttacaatctattcaggtagtaacagtcactatacattaaaatgaacaagaaaacaattacttacagcaatcattagcaaacagtgtaagaaatctctacccaaacgtgttaagacaccacaaatctctaacagcagcacacagaatatatctgattgattaatatatacatgtatggcttatttattggatctttaaagaagaaaagaattttttctttactgtattagtatcattttaatattctaggatttaaaagattactacttccatgtttaacattttgggctgggtgtggtggctcatgcctataatcccagcactttgggaggccaaggcgggcggatcacttgagcccaagagttcgagatcagcctgggcaacacaacaagactccacctctataaaaaatacaaaattagttggcatggtggtggtgcacgtagtcttagccaagaggtagaggttgcagtgagctgtgactatgccactgcactctagcctgggtgacacagtaagaccctgtcttaaaaacaaaaacaaaccaaaaaaatcatttcgaagtctccagattttagcaagtaaaatttctgatttagtctgaaattgggtttggaggagcacctcatttcccccgccaccgcctcccctcagcacagctcctgcctcgctgactctggcatggtgttagaggaagagctctggttctgtatcatctgaggtggtaagccaggcctggctattccaggccatttccccacactctcaggctgtgctggagaaaacaaatttaaagtctgtcatctctagataagataaaactaagagaacagggtagaaaataccataacaatattagccccttgctaccatgcaggcctggcctgttcctgtgtctgagagatgtggggtcaccatgcctccctgtcaccctgggtcagtgcagtggaccctgctggcccatctcttcctccctgtcaccctgggattgaggacatgcatgctgatcatacttaaggcagactgagggatgctcaatccttgcatcaagcctccctacaaaatccagctctcacactgcccggtcaggtagccagcaccttgtctgctcttttcactttcaaagtgtgcaggcagctcagatctggtaagcctccattatcaatataaaagagcaactagaagagcatatatttataagttaggtctcactaaaacattaagacagtcagaaatgacacaatggattccaccgaggatccacccagtccaccccactaactttaggccacagaatcttttggagaatggcaggccattattccaccaacagaagttggaaatatagcctgttgatgcgtttaccacttcttcaaccccttttcagcttagataaccacaagaataataactaatggcatatttaatactggggctatgaaagttttaaattcatcatatcattattttattacattttaggagcattccagggacttagtccatacttattcttgttattcacagggaaatgagaaactaaatggtatcaggagctttcttagacctacttgatttcctttgagaaatgcatgtcaggtgtagagcaatggagggaaagcccccagctgttaagtagtattactgccaagctactattagcagactgaccaggtgtactgatgtaaatcactttttaaagtacatgctttatacttgaattgtaggtataccacacaattacaaaacatttatataattatagtatcaccttatatggtacctgtcttttaagagaatcaaactattttttagacattctacaaattctctgtgttaagttttagctgcttgtttggcacttgggttcttacacaaaggatgatacagtcagagcaaaatcactgaacacaatcacagccctcccagctcacttccagccattatgagacacatgtggcatgaatcactgtcctactactgaatggctatgctcttctcatcttctgtccttacactgtttgttaatgatgaattggaagctctgtgataatcaagccagcactgagagtgcagtttaactggatcactcagccagctcaccatgcagggcaggcagtccaccatgtggcgcggctcttaccagtgctgcacaaaacctcttacacagttttgtattacttttccttccttttatgcagttccaacaactgcatgttttaattaggaaaaacaaactaataaaagcccagtgcactagacttggatctcactgacgcacaggttcactttgtggtggggcctctctaaccctcacttgttgcatggcataggcaagtcacctttcttcactttacgcatttcctcatcactaaaaggagagtaataattcctgctaaatttacctcttggaatcaagagaggattcacaaaccatcttgatgatccaccaagttgttaaattcccctcacctcatttttcagtgtaaccaaaggaaaagagaagatacttttagttggcatcacacactcacaaacgaggatattttaccagttggtaacaaaatgtagtttcacctcttctcctaggcttaccctttcttggtgaaacttttagcaatagtgatatatctggaatttccagagggtgagaaaaggaaagcacaaagggccaagagtgagatgaggaaacgtgcagatacaagtttactgagcaaccaaaatgtgtatttctgccatggaaaaacaacaacaatatgagtaataccagtgaggcatattaaacaaagggagatttttgtgaaatgaatttgagaacaaaatcataaaatgaatgaatctagagctgctccttgagaaaatcagatgacctggattggtaaagagggacaaaaaggtcctgaagacgcttagtggcctgtcatcattcttggtaaacacagaaattctctttgaacaatctggcaaagagtaaagaactgagctatgctcattttgcaatgaaaatccttatcagagttaccaacatgtcccagtttgcctaggacattcccagtttgggttctgaaatccccacatcccataatctcatgatctgggcagactgagatggctggtcacccaagcagccatgcacccttggacatgttgcaaaagacttgtgcagagagcacactcacactggtacgagctctttttactctctggagttattagacctcctctggaggatgctgtcttattgccctgagaaatacccaaaaaactgataagagattgagtcatttctcaggatccattactatatccccaatatctaaaatatgccagaatgctgagggcacatggtaggatttttttccttacaggcctctgttctgggagaaatggtaaacattagtaaatatgaaagaaatgaggttttcaaagtagacaaaatcatgcaaaagtatatttggtgtgcactaaacatagttttgtagagtaaatagattttaagataagataaagataatatcactggtcacttccctgaagggaaataggaggctgagtagaggttgaaggcttagccatatgaaagtattatctattcaaagattaaaaagatgcacttctatctaaaccaatggcacaacattaattattatagctctgcacttttctaactcagtagtaaaatttttttaaaagcttagattgggctgggaaagtttttacatgggtgatctagtacaccactgatataaattgtactgatttccatcattggctaatcactgtagaatactggtaaatcaaatccacttcctaatattgtgtaactttctatgcttgatcaagggtctgatcctgaacaacaacaagctaacgaagattcacccaaaagcctttctaaccacaaagaagttgcgaaggctgtatctgtcccacaatcaactaagtgaaataccacttaatcttcccaaatcattagcagaactcagaattcatgaaaataaagttaagaaaatacaaaaggacacattcaaaggaatgaatgctttacacgttttgggtaagtttttcaaatgaatgggacatcttgaaattataacaaacaagcagatgtagaacactttatcgtcactattaagaataatttccaaaattaatttttgaataatctttgcctagataagccatttataaaccaattaaaatgtccaacaaaatgtttagcacttaaagaaaatatgatcttcgtaatactgtctctctctccctgaagaacctcctttgaggccaggcctggtggctcacgcttgtaatcccaacactttgggaggccaaggcgggcggatctcctaaggtcaggagtttgagactagcctggccaacatagtaaaaccctgtctctactaaaaatacaaaaattagccgggtgtggtgacaggtgcctgtaatctcagctactcgggaggcttaggcaggagaattgcttgaacccaggaggcaggggttgcagtgagccgagattgcgccactgcactccagcctgggtgacagaatgaaactccatctcaaaaaaaaaaaaaagaacctcctttgaaacacttagcgtggtttctgtttctgaccagaccctaataaaatataacttattatttaatttaaaggtagtatttttaatgtattgcataagctactcaaatataatacacaaaattagtttggatattatttggaatgtgcacctaacatttggttatctgctttaagattatcgatgtgaggaattttttgtcttatatttaaaactctacctgattttatttctgacacctatcatataaccatgccatctccctataatatccattcaaaattcataaccaagatactaattcatttattcatttaattcaaccaagtgcctggcctcacttactggcatttcttcaaggttatatttctgctaacaaaacaacaatttctaattgacttacaatttaaaaaaagtttaagacacaaaaatgtacacagaaaaacataaacattttggattatatgaaggatgatcttttttgatgcactattacaataacaaaaccttaattgtgctcatggttggaggagagtgaaaatgtcactgatatggtaattcaaagtgaaaaatagtgaacttctcatatattccagtttacataatacaaagccgtatttttctgatgctgacagaaaggacagtagatagacagaagcagatataccgagtgaaaatgagcctaaaggatgaagctcacgcttcttgggatattcattcttgggatgtgtctctctgcactgtgagtttcctttatatacaacctatgtgtgctaagtcatgtcattctcccctgacagaaatgagtgcaaaccctcttgataataatgggatagagccaggggcatttgaaggggtgacggtgttccatatcagaattgcagaagcaaaactgacctcagttcctaaaggtttgtatttactttatctaagatatggtattttaaagttgtcacctttcaataacgattcaatctaatattgtaaactgtgcagtatacactgcaactagaaatctttgcaccagtaaatctggtcaatatagtctacacacacataaaatgccatatgtagtgcctttttcctgacagaattaagccacaattttttttactccactaagaataaacattaagaagcaatgaacttttagttttccttctctttcctgacatttactcatttatacctgtcattctgtgcagtacctgttagaggtagagaattctatacagaagaaagcagagaaagatagatggggcaagagaccctgtccccaggcatttagccacagtttgaggtgaagcctatgagcccagactgggcagcccctggctctggcaggaatggacatgccattcaaggcaaggcattttgtacccagcttcttcccaggtgtactgtgaagactaatgggccaatacacagaaaggtctgaggacaacatccagcacgtaggaagtgaccacctgtgacataatcattaccaagatgagcactgtgctctttatcatggctttgtgtgacccaaggctagcacctcaagtagaatgctccttaagtctgccagatgaccagtgttctaacccattacttccaagctccctgtctgatgattagctgcataggattgcctttcttggaactcttgctcaaagtcttgctttccttattcccaacaagggcacatgctctctttgctttgatgactaactgggccaaaaataacccctatgattaacaacatatttttactttccaacagctccgtctttcagtatccatgagttaaagcagcaacttcatcacgaccccctctaatctactcacctgatccagaagatcaataaaacaaacatatacagataatttaaaagacacagtaaagctgttattattaatcaagaggtgacctttcacttaggtcacctaaagatcatctaaagtaaaagaggaaaaataacttttctatccaggaaaacaacagtttaattcagaactatacaaatccaaaaaaacacctcagtgtagctttaaaggaggtggatgtttttctacaagaaaccaaaaatgttacatttaccttcccattttagaaaaacaacaaaaaatgcaaatgctacccaataagttaaacatataaaatccctttcatctgctggaagataacatccagtaaaggagagtgaagacaaggaaaagaggaaggtagagggaggagaggaggacagcctacagggctggaggagggagctgctgttccaggccacatctcctgacatggccattctttatgttcacaccaaaagtctttcctacactgcaaaattctatttaaatttcaaagtgtatcttaaaagtaaaggtttaacttctcatgagttttcaagattctttcaaagccaaaaggaatctttagaaatttaaattggaatcaaatctctcaacttaaataactattccttcaaatccccttgacattcagaattcactaacctgtgaaagctgactgcctgcatggcataatccagtcagtattaccccctgtggcaagatgaaaggatgcaggtatcctgagggtccttaccagacccaacaagttatcatgtggacaggatgaaaatgtcttctttcctattcgttcaggaagttctactgcataatattatgtggggaagaggggagacctgtttgaagacagggtgggaacagaaattccggtacaaaagtgtgctaacatttgtcagcagttactgagcttctgccaaattcacacctctgctcgttttatcctagaggctacacttcaatcttctctctggttacccaccttccccatttcctaagggacacaacagttccctcaacttctacaagtcctctcccagagattattctcttccaactttgtacaacctattctagattcgctggcacgttgcaccagctatttttctagtgatttttgtatgtatgatggatctgctctaaattagcaaataatgtctttgaggacagaacctttaccttacatactggagggtccacataatcattccataaatacaattaagctcaattaatcaaaattcaagaaattagaaccttctcagtttagaagaattatttttctgctccctagtttatttattttaaaattcaaaatagattctgttatcaaaataaattcagtcatggaaactattattgctattcataaagatgtttcaattatcttcatccgtctttattgctaatatagaagggaaatatttcatcaagacttgaaaaaaggagagcattttccagctagctaaccagatacttgggttgacaaataatactttgtatatagggctaacaaaatgaggtttgatggaatcttctggtcagtccctttcattccagcttcagttcatttggggagagtgggggtcaggatatgccccgttgagaagagaaagaacgattattcactgggcacctgccatgtgcgggggtactacagatacacttagcttacacaaaaactactgctaattgaaagaatagagccaggcacagtggctcatgcctgtaatcccagcattttgggaggccaaggtaggcggatcgcttgaggtcaggagttcaagaccagtctggccaatatggtaaaaccccatgtctatcaaaaatgcaaaaattagctgggcatggtggtgcacacctgtagtcccagctacttgggaggctgaggcaagagaatcagttgaacctgggaggcggaggctgcagtgagccaagactgcgctactacactccagcctgggtgacagagtgagaccctgccacaaaaaagaaaagaaaagaaaagaaagaataaatactgcaatgacctgaacatatcaaatagggtaaaaatccgtgtttataatggtgttttaaaaaaaacacaaaaaaccttaactggtcacctctgggcattgcatgaattcattacttgaatgaatcaagttttgctgccttttctataaaaacaatcttacaaagtaactaaataattaatgaaagaaaattctttagagaagaattccagctaataaatccatcaagaatgacatcaggaagtcaccattttccaattcctaatgacagaatggatctaggcaacaatcgtgcatgaatgctaagaccctcaggtgaaaggctgatttgcttttatctgaatgtctctctgcatctgactaccagggcataggaagaagttaaaggatcctgataaatgatatcacatggaagctgtcagccaaatccacaaaaggagtgtctcaaacaaattaatatggaaataaatcaaaagaagagggagaaaaaaggagggagtatgttgtacattaagagagatttcaagagcgataagaaccaaatgtattctgtaaacttcatttaatcctaacttgaacaaatcaactgtaaaatgacgtatttgagacaagtggggaaactttactatattagatgacagtaaagaatgtattaatcttgttagatgtgatattaacagggtggttatgttaaaaaacaaaaaacaaaaaacaagatgaccttatcagttagagacatctaattgaagaatttatagaagaaatgacattatgtataagatttgactttaaatactccagcaaaagaaatatggcaaaataaaaatagataaacagatcaataaataattaagagtagataaaacaagataggaaaaatggagataactgttgaagctgagcatggtggttcataatactagttactattttatgaatggttacaattttaccataataagaagttaataaaaagtaggtaccaggctgggtgtggtggctcacgcctgtaatcccagcactttaggaggccgaggggggtggatcacctgaggtcagaagtttgaaaccaacctggccaacatggtgaaaccccatctctactaaaaagtacaaaaaattagccaggtatggtggtgcatacctgttatctcagctactcaggaggctgaggccgaagaactgcttgaacccaggagatggaggttgcagtaagctgatatcacggcactgcactccagtctgggcaacaagagtgaaactctgtctcaaagaaaaaaaagagttagtgcctaaaaagttgcctaaatccataatctgaaacttgaaaagtaaacaaatagtcaattgggcttagtgatacttgacttaacatatatatttctcttcttattaggcttaccaccaactttattggagcttcacttagattataataaaatttcaacagtggaacttgaggattttaaacgatacaaagaactacaaaggtaaacgttcccaaaattttaacttagaatgatacctcctggagaatgtgcacagggaccctggtagagatcactgtctgtttagccagttgctgttggaactggagagtgtgaagggaaaactagaaagaaccacaattggccgggtgtggtggctcacgcctgtaatcccagcactttgggaggccaaggcgggcagatcccgaggtcaggagttcgagaccagtctggctaacatggtaaaaccccatctctactaaaaaatacgaaaattagccaggcatggtggagggcgcctgtaatcccagctactcgggaggctgaggttgcagtgagccaagactgtgccactgcactccagcctgggcatgggcaacagagcgagactccatcttaaaaaaaaaaaaaaaaaaaaaagaaccaccgttattaccacctctgctgataggggcgaatcaagtgaaaagaagaaaatgacttttcaaatttcccttttgttaaatttaggtcaaagaattttctgacaaaactggaagatagttgttacatactgaagtaggttattaaataaagtaatgaaatatctttgaacatatatataaataggacaggcttatattctaactagtttgcggtgttttcagctaactctatcacacctaaccatctgtgtaagacttgatgcattttatatcatttttaggctgggcctaggaaacaacaaaatcacagatatcgaaaatgggagtcttgctaacataccacgtgtgagagaaatacatttggaaaacaataaactaaaaaaaatcccttcaggattaccagagttgaaatacctccaggtaaaacattctacttgtgttcagtagatattggtatttttcttcagtttttataacacactttagcacacctcaagcaaagaccaagtaagcagcaagggtgattcaaacataatgactctccaggttgcatgaggtgttttaagaagtaggagagctttaggagaatggtttctacatcgacgtcacaagaaagctcaggatccatttccatcttttggtttctcctgttgaaactgctgaggacattgcggcaaagccgctggcacagttaatttcagattttagggcaggggtggctacgcagaggcaggactggtcaggaggacatggagcagtgtcacgtgtccttttgatctggaaacatttctcaaggcagagcaagaggattaggctcctggtattttcgctttcagtgtggtgctaggatagacatgtatatttttttttaaacattccaaccagaatacagtatataaccaatttaaagtcaccatctggagcatcatgagttcccattttgttgtttgtttttattcattattagaaatcttttccttctatttgacaactcttaactggctggaaggggccacagattccttggagaatctaataaagatttagatcttcccaagaacaaaagttttcatcttccaaggagcttgagaacaaaactgggcaacaagccactctgcctcttctctttttctttccggtgtatctttaaacaagtttcgttcactgtactcctttgagatacaaaccatcaaaatgaatgtaatataggcaggtgctaatctcaagatcacaacttttgctttgacttttccaaatgctgcatttggatgtctgtttagccagtgactacaacttgagtccgtcctctctcaagctgccccatccctgatgtcatttctgcttaatttgctccacaactctgcttccagcttctggtctctcttaaatctacctatactcttgctagcattaattaaatgaatagaattataacacaaacagaagaacacatgtcataagcatatatttcaatgaatgtccacaaagtaaacacactgatgtccagcaggttttcattcccagtgagatcagtactatggtaaactataccttgcacttatattgagcagctgggggactgaacaccaaacttaaatgttttagcaatgcctagaattttcatgattggtctcatatcagtcttactaagacataaaggcagaatctagaggtaacaacagccagggaggatatcccacgttggccagcaaaagacttctgctcttcagtacacaaaaatgctgtcagttaagtagattgcttttatttcccagaaatctcactgttaccaaaaaaggccaaagaagaaattagaagggctgttaaagggaatgagggaaagttcctctatttaccatactttttgagtaagaatttaatttaaaaagacatgtacacggcctgtaaaattgtgacttgtccactggtgtacataagatcaagtgatttcaattattgatgctatattacaattctgcatttaggatgttgatagatctttctacaaaacaacttagaaaaattctcctttggtcacagaaaatgctagctaataattcttcacaatcaaattgtgagcctaattcttagagcattaaatttcattcttctgatcatttctaatgttttaaatgcattattgtaaatatggcactgaagtaaccatatatatacacataaatatgtatatttaaaaatatgtatgtttataaaagtaaacattacgcatgtatgtatttatgtatatatgtatgtatgtacgtatgtatgtatctatctatctatctggagagagagagagacagcgacccatgtgaccaggcagtatgctctgggccctggcgggagtccttccccaacacttttgtgtacaacacatgagcttgagtttttataataggtatttaacatgcataagtgagtacatctactttacctgaaaatacattcaagccaatgtaaaataaacagatgaataaacccacaaacaaatggcgactacagagtatcttccgtttacatttactgggtatttttaatcctttcttttttcctactacaacagataatcttccttcattctaattcaattgcaagagtgggagtaaatgacttctgtccaacagtgccaaagatgaagaaatctttatacagtgcaataagtttattcaacaacccggtgaaatactgggaaatgcaacctgcaacatttcgttgtgttttgagcagaatgagcgttcagcttgggaactttggaatgtaataattagtaattggtaatgtccatttaatataagattcaaaaatccctacatttggaatacttgaactctattaataatggtagtattatatatacaagcaaatatctattctcaagtggtaagtccactgacttattttatgacaagaaatttcaacggaattttgccaaactattgatacataagggttgagagaaacaagcatctattgcagtttctttttgcgtacaaatgatcttacataaatctcatgcttgaccattcctttcttcataacaaaaaagtaagatattcggtatttaacactttgttatcaagcatattttaaaaagaactgtactgtaaatggaatgcttgacttagcaaaatttgtgctctttcatttgctgttagaaaaacagaattaacaaagacagtaatgtgaagagtgcattacactattcttattctttagtaacttgggtagtactgtaatatttttaatcatcttaaagtatgatttgatataatcttattgaaattaccttatcatgtcttagagcccgtctttatgtttaaaactaatttcttaaaataaagccttcagtaaatgttcattaccaacttgataaatgctactcataagagctggtttggggctatagcatatgcttttttttttttaattattacctgatttaaaaatctctgtaaaaacgtgtagtgtttcataaaatctgtaactcgcattttaatgatccgctattataagcttttaatagcatgaaaattgttaggctatataacattgccacttcaactctaaggaatatttttgagatatccctttggaagaccttgcttggaagagcctggacactaacaattctacaccaaattgtctcttcaaatacgtatggactggataactctgagaaacacatctagtataactgaataagcagagcatcaaattaaacagacagaaaccgaaagctctatataaatgctcagagttctttatgtatttcttattggcattcaacatatgtaaaatcagaaaacagggaaattttcattaaaaatattggtttgaaataaaa

SEQ ID NO: 14 - DNA, 203207 bp, Homo sapiens
agatgctggcggagccggagcagccgcggactcagagagcccttctgccagcgccgcggggactctagcttcaggggctcttcacaggccctgggcgtgcctcagtgacgggacccagcaaagatgacgtggatctgtctgtcctgcatgctctgggtaggtctggctgctttagctgcgacgttactcttcctcaaaccccccgccccccaccggcccctgccaccttatccttttgctgagagcccggggtcggggggtgtcagtcttgaaggaggggcctttctgtctctgacctacagaaggacagactgacttgagcaaccctcagccggaagactttccccaccaacagggcccaggcccagggtcccgggtcagtacatcccctgccccacccccccaccccccaatggagtcccagagctgtaagtggaaggaggccacagagaagtttgcttctctttagagcctttcctcccgacttgcatcctacaatggggtgaaaattcttcaccgccccccctcagttgctgagcccaagatcttgaggaggaggcagtggtggggctggggagcaaagaatagtagtccaaaatattaagtctggaagagctgggctgtgggagaattctcagagtccatcccttttattccttctacacccagtttcagcttccacccactgccatcccttcctccacagccctcccctgctaccaagacctctccatcctggaggagggagccatggcccgctcttccccctttctctcttggctccaggttcagggaggtgggtttcaggatggggatgccaggggggccagcagagaggcctgggggccacgtggtgaaggttaaaagtcttaaggccagacctgggctgaggctcctgggtaaagggggatgggagagggctgcctgctgcagaagggctgggggtcagaggaggagaggaccccttcctcagaggggctcctgtggggctgtcttggccaggcaaaggcatgcatggggtcaggagggtgaggaagtcgtccctggctgaggttactgttgggctctgagagagtgatggctggtttgggggagggggcttcagggctgtgatccagatgtggcctttcctgtccctttccttgttctggccagtcctcgggagggccctcttggcccaggcaagcccatgctgggggcagttgtgggaacacaaactcgggcagccaggtgtcctctgggcaaagaaagaaagggtgggggagggggcctggaatgaggcggtttgggtggcatgttgggctggggtgctgggatggattggattaatagattgagagtgactggggaggcctgcacacaggatgcatttgtggtttactgggctggtgttgacatctgggaaatgggagccttggccaggttcgtctctgtgctgaggacagaggtaggcaggagggagctctgcagcaagaaggatggcaggtagacgtccaggggtgacacaagaaggatggcaggtagacctccaggggtgacgagctgctgtgactggagagagggctctatagatcccttcagctgactgatactgggaaaagtgcctcatcctggtgagcctctgctttcccgttggtgaaatgaggattgcagagaaacagggtacagagaggtagggatgaaattttgtatccaattccccagggcagtgcctggcaggtagagtgccctatgggtgttataccctccctgagagtaaggggaagagtctggggaccaaggcagctgtgagtgctgcttccttgagtgtctttatttttatttattcattttttttttaattgagatggagtctcactctgtcacccaggctggagtgcaatggcatgatcttggctcactataacctctacctcctgggtccaagcaattctcctgcctcagcctcccgagtagctgggactacaagtgcgtgccaacatgtccagctaattttttatatttttagtagagatggggtttcatcgtgttggccaggctggcctcgaactcctgacctcaagtgatcctcccgtctcagcctcccaaagtgctgggattataggtgtgagccactgcgcctggccttgagtgtctttaagactagaaaagcctgtgtccctcccctgtctccttttcctctcctctcctagtccccatcctttctaggctggctgtgatgcccatggccaggatgggccagagactggggcagtagggactggacagaggaagcagtcctggcaccagataggactaggctcaaaccctatttccatcgtttggtatgggcaggcttggtaaagcagttcccttcatgagcctcaatttcttgatctgtaaagtgcagagaataatatactccttgtatggctagggtggggaaagagacaatagatatcaaaagatcaggtatgtaggcatgcagtaggtgctcagcaaatgctggcccctttcccactccacagtctcctgcctggttcttgggatcctctgtatcccagacctgatgctgggggaggatctccctgggaatggtgtcatgggacagggctctactccttgggctctactcctgggctgactgcccagggactctgaccagctactctgaggccaggaagtgactgagatagttcttgtgccctagagtgagtgcttgcatctattggttcacatgttcctgtatggggaaagctgcaattgtgtcatctaagaagtaatatatctgtagtgcatagttttaacaagtcctaggaataaaaatcactttattagctgaggagcagagctatttattatgcataacttgattttctcatcaagtgctcccatttgctattacatattcaagtacggtttatttagaaaataattgcatgcctagcaattgaggctttttgatgttgtgctggaggagttagaggtggaggcccttccttccagagggactcactggtcctcaggaactgggaaggggctcagggtgaggctgaaagagccaccaggcaggggctgggggtcaagtgcagctttggctctgccctgagccagctaagtggtctcaagctggtcactcgacttttctggacctcactgaaatgtgggctctattctctaaggccacatccagctgcagacgatgatgtattttgtttcctggagttggtgtcctgcccagtgctaagcacacatttttgacagaagggtcctcatgagctctggattccttgtgcacaattccggtcatgcagacatcaatctgactctttggtcctgaactcgttctctctagtttggttgacctgtaagggcctcctgactgtgggtttgggaggtaggctgggctgcatgagaatcaccagggtctgaaataagactctccttttgcaaagttttgcaaagtaatgtgtgaggcacaaaattgggaagagcactgcccttttattctgcagtgttgaaaggaagtgtagcatgctggccgagagtgcaatgcctgggctggatcccgggcctgtcacttgacagctgtgtgaccataggcaagtagtttcacatctctgtgctttggtttccccacctacctatagggttgttcggttttgaatgagctaatccacacatacatttagaaaagtgtctctcacatgtaagagctcaagaaatgttagtgcttcttgtaggatggcacattttcaaggctacccagcaagtcagagtcaagactccaaccccatctgctgcatcctctgccaggcttctccattctgggaatgctttggggcaggacatgtggggtccgtgggaatcaagccctgagaatgacgcatgagccctaagtcagcgaagaggactgtggcgggcagcccagggtcagggcatggtgttggggaggtcgtgtgatggaagaagcatcccatcatttggctttctaaccacaccccccacgcagctttccatccttttcacggattattatggagggcctgctctcttcaagctgcttgcacatactggcacatgattgcaagcaggatgggtgttaccaagagggaacctctgggggatgtaagggggacctaacctggactgtagggagaaggtgtcaggaaagactcctcgggaggtgaattttaaactagatctaaagatgaatctggccaggcacagtggtcacacctgtgatcccagcactttgggaggccaaggagggaggatttcctgagcctagaagttcaagactggcccgagcaacatagtaagaccatgtctgtacgaaaaataaataagttatctgggcatggtggtatgcgctggtagtcccagctacttggaggctgaggtggaaggatcacttgagccctggaggtcaaggctatagcgagctatgattacaccactgcactccagcccaggcgacagagcaaggcccagggccatggaggaaaggccctgggaaagttcctcactccagcgcagggcgtcattgtgaggattaaacgaggaaatccagtccaatccctcactagagtgcctggccccactgatggggcctcagactagccccatctctgagcagttccacgacaggacatgatttcgtttcagtgcagaaaatgggcttgatattcagaaatgtgggcagcctgcattaggaaggaggagagagagagagagagagatgctgatggagagaactcatctcgctcaggagagagagagagagagagagagacactgatggagagaactcatctatctcactcaggaaactgagtcaggagctaaaggctcttgggcagtggcctgggaagtgctggggaaatgtcactgtctgccctccttccttccttggtgattcctggtgcttggagaccaagagcatctcctcagccagaagatgacagtacctggtcacctggtgtcttggcttgtaacaagtgtagccccacgttctctttcttctgagggctggttcatgggaatggggtataatttcactacagaaaacagaggccaggcagtagcttcacccatgtgattcttcagacttgtgctagactcagaggacacagagcagatgtgtgtctgacacgtctacctggcaggtaatctgacacacacagaaaagacaacacgaatcgctcaccgctgctgagcgctcaccatgcgccaggccccattccaccgactttacggcataatctcatttcatcctcacaacagcctatgggaggtgactgtcattggtccattgaacagattagtagagtgaggcagagcaagttaagcactttgcccaggtaacaagtgcaggggccgttagactgcagcaagtactgctgtaggctcaaagaaagagcgactgggaaaagcaggggacactaaggtaatcatattcctccccagaattttagcctgcactgacgcatgaggaagtgatcaaaatccaaatcgaggggcattctgcaaaacatctgtcctgtaacctttagaaacatcagtgtcagaaagaaaaatgagaggtggataacgtgtctagtttaaaggatgagagacccagccactaaaggcagttcaggatcctgattgtgtcctgaatccaaaatgaaaacgaaaacaatgccccggctctcatggacattcttggggcagtagaatgactgtattagacagtgggattgtattgatgctgaatttctgagtgtgatcataggagaagggaacatgcgtgttcatcttttccgaagcttttgcacttttcaaactaaaatgaggagacagcgggtagggatatggattctgacaggggtccaggggtatctgggaagacccctgctgaggggatgaggtttgaatcaggcccttgaatgtgcctagaagctggacaagcaaagaggggaggaagggcattctgggcagagtcttagaggtgcagtggggtggcgggtggctggagagcgtggagcagcctgggtggacacagggcagggagccgggaagtggatcttggggattgggactggcagggtgggctgggtagggaccaatacttcttctcctgctggctccagggagggcagggtttattctggacatctgggaagacatggcagcatttggggtgagtggaggtgccagaccttacagagctgtagttgtgatcctgggaggctgtgtaggggcgatgggtgggagcggcctggtgtcggggcccaggaggctgctgcaagagccctggggagaagtgccaaggcctgatatagggcagaggcagtaggattagaaagcataggacgatgaatgtttaggaggcaaaattcacaggatttggcaactggttagttgggggtgggggaggtgcagggaggagttgagagtgactcagagctttccacccagggcgaccaacaacatggtcaggccaagaacatggctagggcatgggggtgggggatttgtgtgtgtaaaggtgaagtggggttggaggaagctgggatttgaggtgcccatgggactcccagaagccagccggcagccccactggggatctgagccttccccacataaacgacgctggatgcccaccaggcctcccagcctaagggtgagggggcatggggcagtggatggccaggaggctgagtgagtgcgacaggagttgacctcccaggtctgtcctaggcctgtgtgtggagatccccttctctggcttgcagactctggccctctccccacatcatccagggctttttggccacaggaaggcttgtgggaggcagcgctgagggagttttgtaggaggagctcaggagctggggaccccggggtctatcaccccctttcatcaccacccaaccctcactgctgctctgcccccacggggcagggaggaaccaacaaacagactttcccaccccagggccaaggactctcgccaaggctgtccaagccagatgtgccacacccctctggctgagcggcccgggcaggaaagctgggctgcatggaaggagggaagggagaggaagccccgagggccacgaaagccctctgatgctgggtgggctggtggcagggtgggggctagagctctgggcttggagggaggagaagaaggacttataggctggagcccttcccctttcctgggccctggctcttgagagaggtgggggttgaggggtgtgggtgtggagagaccaggcagctcccagctgtggctgtgtctccttttgcccctgagttttccctaagtaggttcctttgcagccagcaaaggaagggccccggggtgtgctccgtgaggccgtctgccacttgtcaggaaaagtgacgatcattgccctaacaagccactacccttgaaaagcactttgcactttttggggcttgtttacatcctctgcctgtacctgcagaacaacccggggggagggctgggtaggtaccaggcaccccgcttttcttcttagcccatatttttgcatctgattgttaagttttttttttccccactgagtctcattatgccttcttgcagtgcctgccccctggttttggttttgccttctgaacttcagatgatgtctggtgcctacttacaataactgttccttcatatatttgaggataggaggctcaccgaccgtagactttctcctctagcatcctgggaacatcaaacctatgggacagctgtttcaacaagaccagcgcagtgtccctgtttcacagcggaactaagtggatgccagcagagcctgggggccacttgcctggaggtggcagagctagtccctcgctcctaccagagtttcacagcctcctccttggaggagtgatgtctcctcattcattccactctctgaatcatctgcaagtcccacccccatcactttcagtcccttcattccaaagggaatgttgtgtcatttccccctctctctacactcagactgtctggtccaaactcctcattttcatgtggggactgtgaggctcaggaaaggtcactgatattttcaatgccacatagcctagaaggcagttctccagactcctccctcagtgctcgctcagccagagccagaactcagtagggctgaggggcaggaatgtcctggggcatcccctgtggctgcttagagaggcctaagcaagggcagagatggacctgaagccctgtccctgccctccaggccccaggggggaaatattttgtaaactcagatttcttggggctgggctgccagggcaggcaaaactggggcccctgggagaagctgttctggaaggctgcacatgccacccatggggtcactgggctgccagggctctcttctgggagactctgctgccccaactgtgctttgggaagaaggcctatatccctagggtttgggaaaagggctggatatggggcatggggagggaagtttgctgggtaagtggcaatgggaagctttgcctgactttgtggggtgggagagacaggcttgtgggttgccagagtcggaccaggagagctggctttagggtttcctttctgcctcccccagacagcccttaaactgaaccccaggtcctctctctgcacctcccccacccccaggcctggactgctgcagttgacactgaccagggcccccaccctggaatgtttgtggcagaaatctaagggaagtcccccaagtccaggcccgagacggaaaccaggggaagtgagatagatgaacagaggagacttacctgccccttcttgtgggatgggggtcagagagtgaggcccagagctgccccaccctcaccccagccccagccaaagctcctagaacctagctctctggaatatcagaacccaggaggtggctggctggatctacccctcagaggcctccctgaccaccagggggcactgctgggctccagctccccaccctccgcagtccccacttctagcctgggcttttgtctctgctcccccatccctgacgtctctgtctgcttctctctttgaatttctaaccaacttcagaaaggttgaaaatacagtgcaaagaacatttgtcccctccagaactctgagagtaagttgctgacatgatgccccaccaccgttaaatactttcctgatttttctacaaggactctcttacctgaccagccccgctatcaaaatcaggaaattgacatggatactttaataccattcagtctagacccagggaagtcccgccagtggtcccagtgatgtccttgtgggcatcaacagaatctggttcagaagccgccgttactttcggttgccaagtctttttgctgccttcagtctggaaagctcctcagcctttccttgattttcatgaccttgtcactttcggagattccaagacgtttaatgtgtaggttgtcccttagtttgggttggcctgatgtttcctcatgattaggttcaggttgaggctttctggcagggataccgcagaagcggcgtctgttctcagtgcacccctgctcccagcttggcttcatcatcccattaccgttgcagtgatgttaactttgatcacttgattaaagtggaggaagccaggaaaagttactttcttcttctttgtaatttctaagtataatgtggggaggtgcttggagatgacgtaagtatcttgtgccttatcaaattttgtttattcagttacagtcatgagtcacttaacaatggggataccttctgagaaatgtgttgttgggggattttgtcattgtgcaagcactatagagagtacttatatatacccagacggtacagcctactgcacacctatgctactgtatggtatagcctatagctcccgggctaaaatcccgcacagcatgtcactgtactgaacgctgtaggctgggaactgtaacaggtggtaagtatttgtatatctaaacatatctaaatgtagaaaagggacactaaaaatacagtatcataagtttatgggaccactgtcattatgtggcgatgactgcatttctgatcgtcagcaaagacgcatttaagccattcctatcatcatgtattttgatgctctgatcttcctggatttggcctttgggagctcctgtgtccttctgtctctctttcattctctgacccccttgttagtttctgcgtgtctctgtctcatctctctcattctctctgtctgcctttatcttggtctttctttcttctctgtctgtctgttgctcctctctctctgtcctgtctgcttcccgcacccctctctctcccctgtccttttctctttctctctgtccccctctctttctatgcctttgcctctttgcctctctggctttctgcctctgactcggtctcattttgtctgtttttctctctgtctttctatggcttagtctctgtcactcaggactcacctctgcagtgtcttcagataggagtcctagacacgctggcttgtgtgtgggataccatcactctccctcctctggactcacagtcctcctctccagcctctatttcagacccagggggctctggagcaggtgcaaggaggggaacaggaatgagtggattttcctcccacctgctctgcacactgcaaggctgggatcatgtctctgtgtgtgcgcccacgtgtgtggaggggtgtcagagaggtctgtgcctgggagaggggagagagggagctgctggtgtctgtgtcttgccccctcctgctacagctgggaagggaatcaggttagaccccagggtgagtgcctggggcaggggatgctttctgtggggagtcctctgaataggcccccctgccccgcagtggggcccaaaaggtgggcagtgtctgtgcagggctttgcatcttagagcatgttcccatatgtgatttcaaaggacagactatcagagctccaggggtgtggtgccatccagagagagaaactgaggcctgtggtagtggtggagtggtgactgacccagggctttatggtaagtcaggctcagaggaaggcttgggccaccagcctgcctctcatgcatgaggtggtgtcatttagaaaaggatagtcacatctctgtgttttcataatgcaaagaattgaaaataaaaataaagatggaagaagccttccgggctggggcaggggatggtggagagggtggaatggggagagaatgaggggaaatggcactgtggggccatgggttagagaagcgaaggcccatcagcagtacagtggacaaataaacctgctgcatctacacaatgggacggcgcacggcagagacaaaggagaagctgtgttggatgcagccacccaaagggacctcagattcatggtgtgtgaaggaagccaaacgcaagactatgcactggataattccatcttgaggaggtttaaaaatctggcaccatgactctttggtgatggaagccacaatagtattaaccttggggcgaggggacactgactgggaggagccatgagggagtcttcggggatgtggctctgtggggtgtatgtgtggaacgtatcgagtgacacatttaaaatgagtgcagtctgctgtgtgtgagccatgccttcataataaatgaaaaaaagccaaggtaggagccatgcgggggctgcaggtccctggagctggactctccagctgccgtctggactcaggccatgggccccacctgagtctgggatgaacatcctgtcaccccacacctttctctgtccctgggccctcctccctcctctggaccctgaggggctcttgccatccttttccctgtccctgcctacctctcccccaggctcctctactccttccccaggaccccagccttctacccagggctgactctgtgcctctcctcccacagccagaggatctggaggcccccaagacacaccgcttcaaggtgaagaccttcaagaaggtgaagccctgtgggatctgccgccaggtcatcacccaggaaggctgcacctgcaaaggtgagcagcggtctgggctgtgggggatgggagcacccatcaggggaatgagatggctgggcctgggccaggctgggactctgctgtgcacacatccttggggtcccaacctgacgccttgttctcatctggtggaggatgctgagctcactggatgacaagcatgtgggtgggtgtggtgggcatggcaggtggagggtagcatggaaatggcatgcagcttgtatgaggatgaatggcatgaagaaggtatatgggtgtcatgcgggtggcatgaagaaggtatatgagtggcatgtgagtggcatgtggaagatgcatgattagtatgtggtggcatgtggaggttttgttgagggtgtgtggatggcatgtggctggtgtgtggatgatgcatgttgacgatgtgtggctggtgtgtggatgatgtgtgttgagggtatgtggctggcatgtggatggcgtgtggatgatgtgtttgaagggtgtgtggctggtgtgtggtggcatgtggaggttgtggtcagggtgtgtggctggtgtgtggcctatgtgtggatggtgtgtggatgatgtgtgttgagggtgtgtggctggtgtgtggtggcatgtggaggtcgtggtcagggtgtgttgctggtgtgtggatggtatgtggctggtgtgtggatgatgtatgctgagggagtgtggctggtgtatagatggtgtgtggatgatgcgtgctgagggtgtgtggatggtgtgtggatgatgtgtgctgaggatgtgtggatggtgtgtggatgatgtgttttgagggtctgtggctggtgtgtggatggcgtgtggatgatgtgtgttgagggtccgtggctggtgtgtggatggcgtgtggatgatgtgtgctgagggtgtgtgactggtgtgtggatgatgtgtgctgagggtgtgtggctggtgtgtggataatgtgtgctgagggtgtgtggctggtgtgtggatggcgtgaggatgatgtgtgctgagggtgtgtggttggtgtgtggatagcatgtggtctgtatgtagaagctgtgtggagggtttgtggcaggtgcattgaggtcacatggctgatgtgttttgaggcatgtggatgggatgtggttggtgtgtgggagtcgtgtgggtggcatgtgcttggcactgggagttctgcaaagaaaggacgccccagccctctcctgtggcagctcagaggcaactttaagaggccccgagtcagactcagcggaggacctgttgtctgccaggcttttcaatcgctattttcatgagctcctggaatggcccggggcttggctgtcattattgcctgaaaagttggtgtcttgtcccagatcacacagtgaaatcagcaggagctccctgcacccaatatcagtggctgacaccttcactcaccccgttgccccatctgatgcttccctctccttcacccccacgtcccaccaattgcagggcctcccaaggacagctggagtccccaagcttcttggcatcatcccctcccaattccactgtcatcatttctcatgtgggtgactgactcacctttgccttctcctgtctcctgacctattctctgtgacccaccgtccacaccagcttccagtgggacttaaaaacataagcccaattatgtcagctcctggcttaaagcctttgggggtccctcacaatccccaagacagagtacagacctctttccccggctgccaggcctggtgggctcagcctttgcccagctctctgccgcatgttcctctgctcctgactccatgttcaaaccactggcacctcacatgactcctcactatgttgggcatgtcaaatatgccaagcaggccatgccctttttgcccggagcctttgctcatgagtctttctctccctggcttctctctcttgcccctccctccatgtcaaagtcccagcaggctgggaggctgggcctcagagcccactgaacaatttctaaagcgcttactgcataccaagcactcaaaggcatgacctcatctgatggtcacaccccccaaaaggtgcttgtgtcatccccgttttacagaggaggaaactgaggttggcagtggtcacgtcgcttgtcaaggcacccaggagtggggcccgagtggggatttcaggacgtgggctctcagggggagggaaagtggctaaccaggacttttgcaataccaaaatcagccacgcggtgtcaccctcctcccaagaggtctggctggggcttgcgggcagtttagggttggagccaggggagaagtcacagaagaattgctagaggtgaagttttgcattttgtttgcataacagccccacaccctgccctgcgaagatgcataaattagcccctggcccttccccacggttccttccttccctagtgtcttcccgtcactccagggactcccaatatggtgatacgaggcagtctgggggtgggggcagaaggaagtcctgccaacattcactgtgtgaccttgggcatttctctggctgcagtctccggtggccctcacattccatggctctaggttccccagctgacctggcctgagggcttgggttgaggagaggatttgaccccatgtgaacagaaggctcccagggtgagcaagacatggccctggtttcacctagatctcagcctggccctgctggtgtgaaccggaggggagggtgagtggacagactggtttggcagctctggctgggctctggagggtggggagtttggtgggaagaaagccagggctacactgtagcaggaccagcaggtgtcaggactgggacatggaaggtgcaggggccaggcccagatagggagaagggaggaagactcctgactctataggtcatgtgtgcagcctcagcaaagggactgggatctccaggcctgggaggaggctggggctactgggttcactggtgggagatgcaggagtgaagccactgtctgtgctttggagtcaggagctcatgatggcatgaggttgatagttcccctcatccatccattcacccacccaaccagggccacccgatatggttgtatgggtttttccctggctgagggggcatgtgtggaccaaactccagctcatgtctgttcactgagcctgactcagtgggtttactctgctcccagccttcaagtcttggctacaacatggcaactctcttgatgagtggctctgggtgataggtggggtggggcgcatggaatgtcaaggccctggattcccagtctccatgggacttgcaacattgaagaaagttctgctggaggcagggggcagtgaggaagctcttttagatctggagacactggggcgtttggcctgtctccccttggttgcctggacctatagcttgggccgcccttccgttttcctccctcttgcatttcccatttgatgtaatatggccaaaagaggtgggaaagagaggaaaggaacctggggtctggtcctggttttggaagactcaaagatgaataaggcagataggaaactaagagggtggacatgcgggcgtcatagatgtacaggcaaaggggttcctccggacctgtgaactcctgtgaactcctgcatatgaaccctgtcctgggtctctggggggctgctgtgaggagcattgaggttctgtgtgcctgtaagatgggtcctcatgctagggatgaaggctctgtgtgaaagatgcagagacagatgagacaatggcaggagaacaggtgcaggggcgttgttagtggcccaggctctacttctggccctgcttctcacaacctctgtgatcttggataaatcaattaataactcaggcctcagtttcctcatctatgattaacagggctggaccaagaatacttgctgaggccctgacagtggggagggcctggaaaactccctggttggagtctgcagaggtaggatagcttcccccacgcaggctgctgctcacctcctccgcgctgcgtgcagccatctggcaatcatgaactgagctgtcctctgggtcagatgctgtgccaggtcctggtgctgagagccagccccttacctgggaagacagacacagtcagacaatcatggagcacggtaccaaagctgacacaggtacgtgcgtgcgtgcgtgtgtgtgtgtgtgtgtgtgtgtgtgtgtgtatgtggagggccgtttctgactcagtagagatgttcttgtcaggcttcagcagggaaggcatgtgcaggttgggtcttgagggatgtgtaggagttcctcagtccaaatagtcggcttcccacaggtctctagggaagtgctctatgggagtccatgtgcacaggaggccccagagggaggctatgtggactcagagctttgctcaagggctctacctcccaccaggccgaaacccacaggaagataccaggatggcagctcagcagcccgagggctgccatcagggcctgatctggggcccagacttggataaaacttcacttctcaatgcctctggtgagcctggaatgggggacagtcacctgcagtttccttagggcaggatgcacctggaaagacgatccgtcctttaacaggacaagcctgtgcagaagccggcacccactggatttggggaaaccttgtttctaggaactctttccccctgttacttcactggggaacctagcttctgccctgtgtctgagggcctccttggagccaccagaggtagcctggtagggtgggaagaccctgggtttctagccctagcttgctattaatacaacctggctgtgtgaccccaggtgagatgcttaacctctctgggtctggctttcccttttccctaaatgaggaggtgggattatttaatgagattagaggctctaaactgtgttctgaaggagctgtaaggtttttggaggagctttaggggccaaagagggtaagaaagagatgaatccaagggaatcttaaggggtcagggctctgggacccctgcccacctcagtcagaggagctgtggttttaggagttaaatccatcaggaggcaggatcctgtggtgatcccgtccttgacttagatgttctgattcaaatccccactctgacccttactagtaagaacttgggctgattgcttccccctctaagcctcagtttccttaattttaagatgggacaaaagccgggcacagtggctcccgtctgtaatcccagcacttcgggaggctgaggtgggcggatcatctgaggttgggaatttgagaccagcctgaccaacatggagaaaccccatctctactaaaaaagaataccaaattacccgggcatggtggtgcgtgcctgtaatcccagctacttgggaggctgaggcaggagaattgcttgaacctgggaggcggaggttgtggtgagccgagattgcgccattgcactccagcctgggcaacaagagtgaaactccatctcaaaaaaaataaaataaaataaataaataaaaaataaatgggacaaacagcagtacctccctcatcaggtactgtgggattaaatgagattatatatatatatgctgggctccaaacagagcctgatatatagcaagcattcagtgaatcttaaccagcatcattgtgattccacacaggagcccatctgcttgaggaatttagctgtaaaaataaaagtttgaacactactggatgggatgatctagaacagggtgtccaatcttttggcttccctgtggcaccttgggaaaagaagaattgtcttgggtcacacataaagtacactaacactaaccatagctgatgagctaaaaaaaaaaaaaaaaatctcataatggtgccaggtgtggtggctcactcctgtaatcccagcagtttgggaggccgaggtaggcagatcatgaggtcaggagtttgagaccagccttgccaacatggtgaaacccgttctctacttagagatacaaaaaacttagccgggtatggtggcgagcacctgtaattccagctactcgggaggctgaggcaggagaatttcttgaacccgggaggtggaggttgcagtgagccgagaacatgccaatgcactccagcctgggtgacagagcaagactctgtcttggggggaaaaaaaaaaaaaaaaagaggctgaggtgggaggaccacttgagcccaggagttcgataccagcctgggcaacatagcaggaccccatctttacacaaaataaaaaaataaaatagctgggtgtggtggtgcacacctgtagtcccagatactccagaggctgaggtgggaggatcacttgagcctggggaggtcgaggctgcagtgagctatgagcacacgactgcactccagcttgagtgacagatggagaccctgtctcagaaagaaagactaaaaataagaaagaaagagttgggtgcatataagaaaccatcttatgtgcccccctgccttgcaaaaaaaaaaactcataatattttaagaaatttacgaatttgtgttgggccgcattcaaagccatcctgagccacatgtggcctgcagcctgcaggttggacaagcttgatctggaaggtttcttcctgttcttacttcagagccacaccatgtcccccgaccatcccctgagacaccttgtatcagtcaaggttctctgcagaaacagaaccaacaggatgtgtgtagaaaaaaagagatttatttaaggaattgtctcacgtgattgtagagctgtggcaggttcaaaatctgcagggtaggttggcaggtggggtacccctgcctgttgtagctcgagtccagagccgtgtgctggcagaattccttcttgcttggggaggttggttttctttattaaggccttcaactgattggatgaggcccacctaaattatggagggtcatgtgctttattcatagtttactgatttaaatgtgaatctcatctaaaaaataaaaccaaccgactttctcagaaacatccagaatagtgtttcaccgaatatctaggtaccgtggcctagacaagttgattcattaaattaaccactgcatacctccagcccaggtcctggagatgaactggcagggcagggtgagtggccggtgagcaggcaggtggccaggcctgtgcctctgtgccggccatggaaggagctgaagccggaccgggcatgcgagtggttatcgccggggtcaggtgcacactgaggctatgtgctcattttccgacccaagtccaggaggaaaaggccatttagatcccaacaatgttggcttcctgtgttcccgagaggcaggaagcaaccccaggacagagtaccggcagcccagctggggtgggagctggggccaagggctgggggtgcagttcttcaccccagcagagtaatctaagggtcccttcccactaaggggctctctgctccctctcaggccaccactgggccctgctgtgcaggggcagtgctgacatcgtgggcagagatagggctcctggggctccatggagctccggttggacagggtcactggctcaggagggtgcatacgtgggtttgtaatttcggggccttctgtagtagctgggaggccatgatctgctcaggtagggcccatcctgacatgtgtatctgggggaggactcaggagaagagaaggctggggttttcctgctcttgtttctccctgcatgtccccatccttctgatgagaaatggtacctatggagtgagcatccctgtcactcacagactggtcccttgtcactcacagactggtccctgtcactcacagactggctgtctccccagcagtgtctgatgttcccagggttggaacctgggtttttcccctttctcagttgaagggaggaaggggtgggtggcattggtggtggggggtgtcttagtcgggctgttacagaataccttagcctcttaagagttactttctgggacacaatgactaattacttggtagggtaagggaagtgaggaaggagttaaagcgagagtttgcaggcaccaagcagcaaggtaggacccaggagatggcctctggccttggttcccagcatctgctacctttggcttttgcattctgatgggtcttgtgttctggtatcagtgatctagtactgcataaaaaattacccgtaaacttagtggtttaaaataaatacaggctgggtccatggttcactcctgtaatcctagcacttttggaaacccaggcaggaggattgcttgagctcaggagttcgagaccagcctgggcaaatggcaaaaccctctctctacaaaaaatgcaagaattagcagggcatggtggcacatgcttgtagtcccagctgcttgggaggctgaagtgggaggatcgcttgagcctggtagatggagattgcagtgaactgagattgtgccactgcactccagcctgggtgacagagcagagcaagaccatgtctaaaaaaaaaaaaaaaaagaaaagaagaaaagaaaaaaaatcaaaattagtattccacatggtttccatggctcaggaattcatgagtgacttggctgggtggttctggctcagagtgtcttataaaggtgcagtgaagatgtcactggggccgtattcatctgaaagcctgactggggctggaggatccagttcccacatggctcaggtaatgctgtcaagctggggctggctattggcaggaggcctcagcccctcaccacatggccctctccatagggctgcttgagtgttttcacgacatggtcactggcttcccccagagcaagtgatccaagagaccaaggctgaagtcaaagtgtcttttatggtttagcctcagaagtcacacactgtcatttctacaatatctgactgattacataaatcagccctatttagtgtgggaggggactccagaagggcatgatgagtagcagaggcaagaaatattggcagctacctgcaaggctggttgccacagtttcccattctgtaacacatctgaatatttcatcgatctgaaagtgagaggccagcagattgacaggcccaaacttgagattacagcaagacggatgcacgttagagaggaggacatactgccccttgggaggatatgtgagacaggtggataggcacgcaaagagggcttccctggaggaaactcagcaagcgggcctccttggggttggaggcggttgcttctgcaggtgtcaatatccattcatgggggcttggccaagcctgtcctgcttggcatctgccacttgctttcagtttgctaagcttttgtcttctgggctgggagctggggtgggagtggtcttccctcgttcccctctgtagagctgccaaggacaagctttctgcattccagtgtacaggaagcactcagcatagcgtattgcaattacctgatgatttctccatttgcccccccacttgagggcatttgctgagtgtgtgcccactgtgtgacaggcagggctgccctgtacagtcaggcaggccatgcactgccaagggtgcctacccgagagagcacaggagtcagcccaccctttgcctaccaagccatgcattttggcacagggctgatctgcctggagaaagggcaccttctcaccatttccacaaagacactgtgcatgagcccagctgtgtgtccctggggctggtctgcccaggggatgggcctccttctagtttgcacaaagatgctgtatggtctcatgggcctgaagcagacactgtcctagctgctggggctacagtgcaaaggagacaggcatgctccttgccctctgagtgtagtgtggggagatagattagagagaagttacccagggcaacttcagaaaataaccaggaaataaccggtgtgctgaaaaggaataattggaaagctactctaatttgagtggtcaggggaggcctctttgaggagatgactttgggtggattcccaaaggataagagggatttggtccagggaacgatggggtgctggggtgagggggagtgtaccaggcagctgacacagcaagtgccaaggccctgaggcactctgggaactggcagagcagggagcatgctggagggaggtggagtcccggcccccattgtgtccctcatgtctagactggggtggatgcttagagatgcctttttggttgaacatgagatgttgaggtggcggtctacagctcaggaacgatctgagagtcggggggacatgactaaattggggtgcgcataaaccacaggggatatcttcagacaggtccaactcagcaaacgtttattaagcctctcctgtgtaccaggctcctctctctctctctctctctctctctctctctctctctctgtgtgtgtgtaggagagagagagaggcaggtccccctggaaggagcccacactgttggaccaacaaaggggacgtttcctctatttggatggggtggggcaagggaggctgctggtgtccaagagggaacacctttgcgaagtgagggagttgctacccgggctggtggtggtgctgagggagagggagaagcagaaagaccagagtgatgggtaacgcttgtgtggctgagtggggagtatgtcctgctgtggccagggtggagatgtccctgagctaggctgggtggctggtggggtcaggaaaaccttgctcagcaccggtgagtcacaggcctgggctgggccaggactaggttctgagagaagaagatcccatgttagggccagtggccaaggtccctttccaggcaccacccagtgtgcttcccagcttctcccccttccccatgcccagccccttctgcctcagacaaatcagaagaagccttagtgtggggaaccccggagcctccctgggctgctccgggcattcatctgtgcctcaacctccctttctgcagtctgctgagaatcaggttggttcaaagctggaagggggtggggtgcaatagatccaggagaaggaggtggatggctgtggtcctgggctgtggctgttgaggatttggagtcagggcactcccctatctccccctccccagttctctaaccagagttcctaaccccccagccttagcaggtcctgggcagccaacaagacccaaagcagtgcaaaacccaactcgggagacccctcgcccacccatgagatctgcagggaggtcaccaaatcccttggtggagtcccagagccctggggggtggggcggcagggctggggacattccaggcttcgggaaccttataggaaatttgattccagcttctggtaatgggaggaagagcaagtcctgtgtgtgtgtgtgtgtgtgtgtgtctgtgtgtttcaagtcatgcacatgaagtttatgtgagcatctgttcacgtgtctgtgtccacaaatctgtgtcaggctgcaactgatggtgtcccacaaaattgtgtgtgttggtgccctgagtcagggctcttcctggatgaatctgtgtgtgtgagactgtgtgtgtgtgcgtggatggctgtgtggatgggtgggagtggttctgggtgagtgtgtgggtgtgggtgtaatgtgtatatgcgtgggcccgctcctggactctgaattgtgtctgtgtgtctgtctctggggcagagtaagtgtgattgtggtttgcgatgtcgtctgcctgcctggtgtgtgtgtaaggggagaaggccccccttattccttggtggggctggcgtggggcccgggtccgggctacctctgcccctggcaggggtccagtgggggacccccccctttgctccccccaccttcccgcacccggaggggctctggctctgggagccccctgcctccccggccgcgggtcctcagtcccgggcactcccgccccgcaggcccggcagccgctcccctccgtcccctccctctctccctctctccttccctccgtccctccttccctccttccttcccgagcgcggattgcgggctggggtgggaggagatttcgcggagtttccatttcatacctcgcggctaaaactttctttctgtgtctcgccctcttgcagtctgcagcttctcctgtcatcggaaatgccaggccaaggtaaggggccgcgggctggcgggcccgggaggacttgggacaggcctggctcggggtcccagattggagcgggggcgccggcggggcgggggcggtgcccggggcgtccctcctcctctctttgtttatgcaaagcgcctgggcctgggagcgggcgcaggtcaaggtgaaggcgaaggcccgggggcgggggcaggggcgggctggggaatcgggggatctgggtggggggcgcggagcgcaatctgggcggttaccgggggtggctgatggggaccgagctcccagagagcggcctttgaaggtgtttctgctagttctcaagggggagagggaaagggggaggggatccatttcaattaccccgggccgcgcacaaccccagttggctcaatttggccaacctagaaaacctcagtgtccacagccacaggaccccgagggcaggagaagcgggtgggtgggataaatggagaatgaggtcggaggtcaggattggctggtctggaaccgcctgagagactgtcccttcctctttattggccaggtcttcttttggtcctcaatttccccatgagtattttctggctggtcttgatgggaaagggaaactgaggcaagaagactggagggattgctgggccctggttggccaggctggctcagcccctgatgtatccactgaggtttggacacaggagtcatatatcagcttcttggagtaacagggggtgggggattggcaccaagatggattatgagtttgggaaggaaatggttctgtccaatgggctcagctctgcctaggggtggaaatggcgttccttgcctttcacttgcagccaatgtctgcaccttctgccattgttgcttgtaaccctccctgccctttcactccctacgtttgctcttcatatttgacctttcaaggagttcagggagtagaaggagaagatgcttccagaaggagcattcattgagcagttgaggacctgtatctggtacatctcatgttttgcttcttattagctgggtggccttgggcaagttatgtacctctctgagtttctgtttcattctcaaggatatgggaataagaagcctacctcataaagttgttgtgagaattcaatgaggtaatgtatgtgaagtgcccagcccagtgcctggcacagggtgggtgctcaaaaatgtcatgactgatgctcagctactgggagcttagagggacaagtgttaccttggggaaggggtgctgacggatcaagcaggtctgggaagaatcttcctccaaagaaactttactaaagccgagcacacaccttgctggagggcgtctccatctgtagactccagcttggaatgctccccttgcagagatgcagagggcctggcttgcagcaggtacctccatgcagtgggttttctgccccttcccttgtcttctcctttcctgcggcctctctcagcctttcctcccctggatggagagtacgtttctgcttctccttccacctccctccttgttctgtttatccagagcagagttttttgccttaaactccagaactttccagttttcttgctcctccccagtctaccccttcgtactgcccttcctgcaaccttttcttttaatagcaatggacatttgtacagtgctttgggtcttagacagcatttcacatgcattatcagactttgttcttttaattcctttagagcataaaacattggccaaaagattctgttgttttacagatgaggaaactgaggcgccccacgttgagtgacttccccaaggtgtcccggtgtaattcttcacctgctctctgtccctgggcctttgtgcttccttctccttgtctctcactgcctactggcatgcatttctccatccttgcctgccattcttccttttgctttccatctcttgacagcagcaggatatatttaggaaggataaggggataaacttccgggcagtgaagggtctgattgggggagatgggtggcccagagaggcccagaaagatatgacagatggccccttgtcatgcagtagccttgtgcatgggaacaggcaaatggcaaagatgactttttgggggcatagcctacctgaggagtctctcacgtgtgctgggggctcagaatgcaccaggctgccgcagtgctgctctgccctgcccaaggaggccaactaagtgggggagagggtagactggcagggcagcaaccaggcagacagatgggctttgtataggagtttcctctatagggaatgggacccactggtggtgagcgctccacccagctggtgggtctttctctgaaaccagagctcttactgccgccctgccttttcctcctgctgggaagggcagcgggagccacagagccacagcagagctctatactgtggattttatagcctcgtcaaccttgaggtcatcttgtccatcccctgcttctaggcaggattcattagtaatctccttccacgggccaaatgctgttctaagtgaacagatagagaaggtcttggccctcatgggtcttgcaatctaataggggagacaggcactaaataggcaaacaagttttgaagggaatgagctggagcaatgggttagagaattctgctaaggtagcccagaaagactccttggaggaagagtcatgtgaggtgggacccagatgatgatgtgggggaggagaaagagcaggtgcaaaggccctgaggtgagaggaacttgttacgcttgaaagagggctggagagtagtgagtgctggggagtttgggctggagggacgcgattggatttccactctgagaaggccactctggccttgagcaggcaccagggtgggagtagggacatgggccaagaggctgctgatgttgcccactcgagagagcctggtggcttagtccatggtgctagccagaaaagcagtgaggaggggctgggtctgggatgccttctgagggagagctggagcctcgctgagccatcggattttgggtgtgagagcaggagtgggcttaaagatgactcccagattttggccagagtaattgggtgcacatggtttcacttactgagatagacgaggtatgcgagaaatttctaggaaagatggctccagggtttcagctttgcttggtctccttttcacagtccccccatgcacttggggtttcttgctgatgttggtcctctcctattcagcctgctgtagtcactcctctggtaagtggctggttcctaatgccttcacacgccaccctcactgttcctgcagcacgaagcgatagttctgacaggggctgtgttatgtatacagagtgatatggtgtaataaatggcccccagatttagtagcttaaaatagcttcaaacacttattatctcataataataaatgttttggggggtcaggatgttgggggtggcttagctgactggttctggctaggggtctctcatggggttgcagctgagatgttggctggggctgcagtcttctcaaggcctgactggggctggaggatcattttccaaggtggttctgtcatgtggctatcaagttggggttggctgttgccaggtagcctcagtttctcaccacacggacctctccatagggctgcttgagtgtccttacaacatggtggctggtttcccaagagtgaatgaatgattcaagagagagcaaggcagaacccacaatgtcttttatacactatccttggaagacacactgttatttctacaatatcctattggttacataggtcagccttattcagtgtggaaagaatctacataagggcttgaataccatgaggcaagaatcagtgggggccatcttggagggtgacactacagatgcccagagacagggcaatgctgacctggcagctaggaggccgtgggtgtgttgggaagggcagggtacgggaatcagacatacttgggtttgaactctacccctgctgccttctagatatgtaagctgggttgcagaggattaaatgcacattggcatatagtaggcacctttctcctttcttggaacgatagtcaaagcctggaaaggatcccagatattctgtgcccagctctctgccacttggacgtgcttgagagaaaatgttcctgctggtagaggtagagcctcggtgccggctcatagtcaatgttatctatgtgttgattgcccatcggaaggttgagagctaggttccaccccagcttcccgaatagtacctagtccatagtaggagtgcctataaagggataaaaggatagaataaaggaattttgagaaacaagtcttcctttctggggagaggctgaggggatggaggaaagcaggaaagaagtagcagcaaaatcactttaaatacccctcccaaaaaccttcctatcttctgacacagagggtgctgcaaataataattctaatcatattcctttttctaattggggtataattcacactctcaattatacaaaactcaaacgtacatcctgatagatttgtacatacatgagaaccagatcatgatctagaacattcccagcacccaaaaagcaacccttatgttccttcaagtcaatataccccaaaggtaattgctatctttatctgtatcatcagagattagttttgcctgttcttgaatgttcatcgaaatggaatcacacagtatgtttgcttttgtatccggcgtatttcactcagcattatgtctgggaggctcatcgtgttcttgcggattgcaggagctcattctttttaattgctatgttgtattccattacgtgaagaaaccacaatgtatttatccattccactgttgattgccatttgggttctttcccgtttgggactgttaggagcagacctgctatgaacccttagtcacctctgtctacacagaactttgtaatctacaacatgttttccctcgtctttgcagttctgtgaggtgggcagggctcacggtggccccattgtacagatccaacatccaggccccatgacggtgcccaacttggctaatggcaccttggcataggggccttcgatgtgattctggtctgctctgggttaaatgggcagggagcaggtgaggagagagaacaagcgtgaaagcatcagacactggagagaggggcctgggtcagagccaggaatcttactgtagttcatggaaaccccattctacatctcctgaaggaagcaaattcccagtctccttaattcccacccttacccctcattggggtccttatctgtccccagttgtttctctcctgttgaggatttaaaatgaatggcccaggacttgtcttccaatttttttttttttttttttttttcagagacaggatctcactctgttgcccagggcagagtgcagtggtgtggtcacgattcactgcagcctcagtttcatgggctcaagccatcctcaatcctcccacctcagccttccgagtccgagctgggactgcagtgtgcgccaccacacctggctaattttctttttactttttgtagagacagggtctcgccatgttgctcaggctggtcttgaactcctgggctcaagtgatctggccgccttgacttcccaaagtgctgagattacaggcatgagccaccacaccctgcctgccttccacttttatgttagcacatgtgctgtgtgtatacagcagcttttcttcctttttgcttttctcttctgtcccctgctatatgactccataactttcaaataacttttatttatgtatttattattttaagtaaaacttttaattttagaatagtcttaggtttacagaaaagttgcaaaggatagtacagaaagttcctgtgtggcaagcacccagtttcccctagcccctggatacattttgaaaaatgctttcctccctgctgatcctcactccttgttttgaaatagcagtttcagttgacaacagcagcctgttccagccaaatactctttgtctgctgcaggtcagacaagagttcagtgaaaggaccaggcagctgctgggcaggcagatggcccaggcttcagcctcttgggtggctctttcttatccactggcttccttccttagctctctgttacctctttccagtcccaagtaccaactgaggcggagggaggaggctgcagcaacagcttggtctcctcccctgtaccaaaagggcttaaatctcatcctttaagcttgaaaggaaaggaaatcccataattaacccccacctttcagtctcattgcagattacctttcctgctagtcttgtaaacacacctgcagccttcttttacagttgggttggaggcttgtattctcctgctaccagaaatacctgagtgggaggaggttcatggccccaggaccatcgatggctctgagcctagtggagtgtttaagctcttggactttggagacagacttaagtttaaatccctgctgcatcaataactggctgtgtgatcttgggcaagttactgaacctctctgagccccagcttcttcatctgtaacatggtgattctagtagtacttatcttgtagagctcttgtgagggctgggaatggtaaccctactaaaatgctaagctcaaaactcagttgttaaaaagttgctaatatgtacttattattttgtattcttctggccttctcctacttcctgtaaggtggagagaatctgagagatcaacaaagctttctgagggcagtggtgtgaagactggatagacactgcttttgtttttccttcttttctctctctctattatcaaggaagagtgaggaaattctataggcaaatatgatatgtctttcgcttgtttgcctgctgaatggcccctgagatctctagcagtggtttgaagtcttgtctgcacattagaatcaccttggtgctttaagaaaaccgatgtctgtattctactccctggaggttctgatttaattagttttggctacgacctgacctgggcattgggatttttaaaagtggtaaccagtggtgggaatgtaaaatggtacagctgctctagaaacagtttggccatttcttataaaatccaacatacacttgctgtatgacccagaaattccactccaagatatttatccgagagaagtaaacacatgtctgtaaaaagacgacttgttcacaaatattcatagcagctttatttccaatagccccaaactggaacgaacctttatattcaatgacaggtaaatggataaagaaattgcaatgtcatagtacagtgggatactacactgcaataaaaaggaatgatctatgcgcaacagtgtggatgaacctctaaaacgtcatgctgagtgaaagaagccagacacaaaaagggcacatactgggtgattcccttttaatgcaatttggaaaagacaaatcgctagtgacagagcagattagtagttacctggagttgggagtggtggggagattggctgcaaaggtgtgtgaaggaacttccttgggggatggaattgttctctatctggattgtggtaattatgcatgcacctgtcaaaacccgttgaactctattcctaaaagggatgcattttgttgtatgtaaattatatcttaataaaatttattttaataacatttcccatgtgcacttcctttgcagccacatttgagaaccattggtctatggcttctggagaccaagctctgtcttcttggccagtgctagcacaatcccatgtatttaatagcgcttcctggggttgagggctttctttcctggtttttttttttaacaactttattgaggtataactaattcacataccacacaatacgcccatttaaagtgtacaattcaatgattttttttgtatcatcacagagttgtgtgactgtcaccacagtcaattttagaagattttcagcagctcggaaagaaaccctgtaccctttagcttgaacccctaatccctctatctctccccgacctcaccccagcaatcagtagccactaatcttcccgtctctatatatttgccgattctgatggtttcatagctgtggtcttcaagactggcttctttttctttgcataatattttcaaggtacatctatgctgtagctccctttttatggttgagtaatattccattatatgagtgtagcccatgttgtttttccattcatcagttggtggacatttgggttgtttcactttttggttattatgactaatgttgccatgaggattcatgtacaagtttttgtgtggacatctgttttcatttctcttgggtgtgtgtagttgggagtggaattgtggagtcatagggtaactctatgtttaatgttttgaggagctgctcagctgttttacacaatagcttatattggttttctagggctgtcctaaaaaagtatcacaaactaggtgacttaaaacaacagaaatgtattgtctcacagttctggaggctagaagtcaaaaatcaaggtgttggcaggcctgtgctccctctgaaacctgcaggggcccttccttgcctctttccagcttctggaggtttccagcgatctttggtgttccttggcttgtaggtgcatcacccatcctctgtcttcacgtggtggcctacctgtgtcctcacatcatcttccttctgtgtctatgtgtctctgtgtacaaattttttttttttatcaggaactgtcatagatggttaaggcccatcctcatgaccccattttagagcttgattacatctgtaacgaccctactttcaaaaaggtgctgggggttaggacttcagcacatcttttgtgagggacataattcaacccataacatagctgtgccattttacattcttgctagcaatatgtgaagtttccaatttttccacatccttgtcaacacttgttattatctgactttttgattgtagccattctagtggatgtcaagtggtatctcatcatggttttgatttgatttccctgatgagtaatgatgttgagtgtcttttcatgtgtttattgattatttgtgtatcttttttggagaaatgtttattgacattgttcatttaaaaaattgggttatttgtcttttattattgagttgtaaaagttctttatacgttcaggatacaaattccttatcaaatatagatctgaattttttttttctattctctggttgtcttaaaagccagttttgaatttagttgaagtctagtttattttttctttagtggcttgtgcttttgctttcatatctaagaatttattgccaaatccaaggtcacaaagatttacccctgttttcttctgagagtttacagttttggctcttatatttaggtcttttatccattttgagttaatttttatatatgatgtgaagtaaggtaaatgctgttttgcatgtggttatccatttgttccagcactatttggtgaaaagatcattctttccccactgaatgatcttggcatcattagtattaagtttcaaaattgggaagtgtgaattctctgactttattctttttcaaggttgtcttggctattctgtgtcccttaaataaattttaggatcagcctgtcaatttctacaaataagccagttggaattctgatagggtttgcattgactctgtgggccaactgggggagtattgccatcttaacaattttgaggctgggagtggtgactcatgcctgtaatcccagcactttgggaggccgaggtgggtggatcacttgaggtgggtaaggagttcgagaccagcctgaccaacatggtgaaaccccatctctactaaaaatacaaaaattagccaggcatggtggtgcacagctgtaaacccagctactcgggaggctgacgtaggaagatctcttgaacccgggaggcggaggttgtattgagctgagattgctccactgcactccagcctgggtgacagagtgagactttgatcaaaacaggaaacaaaaaacaccaaaaaacaattttgagttttctgattcatgagcatgagatatgtttatatttatttatatcttctttaatttatttcaacaatattttgtaattttaagagtatatattttttacttcttttgtgaagtttttcttcagtattttgttctttttgatgctgttttaaatggagttgttcttaatttcatttttaggtctttcattgtcagtatatgaaaatataattgattttgtgtagtgatgatttatcttacaatcatcagtatttattaattctaatagtatttaaggggttccttaggattttctacatacaagatgatgtcctctgtgaatatagttttagtttttcctttccaaccaggatgctttttatttcattttttgcctaattgtcctgactggaaacttcaatacaatgttactagatgtggcaagagcagaaattgttgtctagttcccgaacttaggaggaaactatccaatatttcaccactaagcatgatattagctgtggatttttcacagatgcccttcatcaggttgaggaagtttccttctattcctagtttgttgaatgtttttgaaatcatgaaatggtgttggattttgtcaaattcttttaatgatgatcatgtagtttttgtttttttagtctattgatacagtataatacatcaattgattttcagttgttaaaaccacctttcattcctgggataagtcccatttggtcatggtgtataattctctttcttaaatgtttctggattcactttgctagcattttcttgaggatttttacatctatattcgaaagagatattggacggtagttttctttttcctttgatatctttggttttggcctcatagaatgatttgagaggtgtttgtttgtcttctatgttttggaagaatttgtaaagaattgatattgattcttctttaaaagtttgtggagaacatttaaacctgtgaagccatcgggacctgggcttttctttgcgtgtagttttttgattgccagttcaatttctttatttattataggtctattcagatttctaatttcttcttgagtcagttttggtagtttatgcctttctaggaatttgtctattttatcttagctatctgatttattcatggtatttcttcataattctttttatttctgaaaggttggtagtaatgtcccctctttcacttgtgatttgagtaatttgagtcttctttctttgaatcttaatcaatctagctgaagttttgccaattttgttgatcttttcaaagaatttaccttttccttacttttgcttatagccactgtttattttttatttttatttatttatttatttatttttgagaccgagtctcgctctgtcacccaggctggagtgcagtggcttgatctcggctcactgcaagctccgcctcctgggttcatgccattctcctgtctcagcctcccaagtagctgggactacaggtgcctgccaccaagcctggctaattttttttgtatttttagtagagatggggtttcaccgtgttagccaggatgatctcgatctcctgacctcgtgatccgcccacctcagcctcccaaagtgctgggattacaggcgtgagccaccgcacccggcctatagacactgtttattaagtatcccctgcatggtgactacgtgacactcttctcatttaatccttgaaataccacatataaagcagatgtgattgttcacactgtcagatgagccattgaagggaaagtcttaacaccagttatgcaaccagcaggcagtgatgtgggcttcctgctcgggtctgagagtctggctctaatgtctgatggatttcagtacagcaagggacctttcgtgttccacactcagcctctactccccacagctgtgacttcatgattttctgactttatcattgcttaggggagagcaatgggtcagtgttcccttgtgctgttcagtgagcctcagcatcgcttggtgagcctgttcagcatactcctgccctgtcaagtttgactcagtgcatctggggttagacttagggatctgcattattttccaacatctgatgctgggtccctggcagcgcttgtggagcccgtgtttgccctgggaaatgcctcttcaacttaactggatgcaggccctggggaagttactgcttcccctggtgtctgttcttctggcttcagcttcgctggggatggattcaaggatgaggtaggttttgggggagaagctactttctcttgctttataacaattttgcaagaagctttaacttcccctgacatctttgagtctctctctctcttgctgtctccttacacacgcgcgcgcgcgcacacacacacacacacacacacacacacacacacacacacgcagcctgctccccatagcagggaggggcaaggctgggggtgaagagacactgagctgtgactggcttctcattttcctggaatgtggctccccaaaggtctcatatttttcagcgtttctgacgctgcggctgtgtaaacatcacacaagggtttgctgcatctgagagaccagaggagttagagagagggggagggtaggagcccagagcagagagaagggcaaatgggagatggagaatggagagagagagagaggagaggaaagtcctggggtcctggtggaacaggatgctggatgaagcacgctagagggaacaaagaccagtggagtcccactgagcaggtgagggatctaggagggcggggtttgtggtgtggtaccaggggagggcagaaggtccagttcaggttaggagctctatcggtgaggtgggaggagacccctggtccacaccagccaccctggctgcttctggcttctagctcggggggtctgtggtgcccgttgagctggctaagcagggagagcaaggcctttgctggtggacggccgcctcccggggtgtggtgagcctggcagtggtgagtagcagctccttgcctcctggggctccaccttggctgagagaacctgctggtgtggagggaggcccaggatgccttatgagaacctagcattctctgctgctgggctctgcctggaggctcagactcagttgtagttctctgagcctcccaagccactgacctagaactacccacttcctgagcctggacagcaggagaggtggcctggtgcatgcagttggagtccctgtggcctccggcttaggaggctcttgactctgctatttacatgaaccttgttgtatcaggcaagtcactcccactctgaaatcaggtttcctcagctgtataaaaatggtgacattgatatcttgctgatatcatgctgaccttgcaaggttggtgggaggattagagagaatgtaggtaaaatcctggcatgtgataggcttttgctcaatagataactcttgttctattcttctgagatcctaggataataaagagctaagtgccccagaaataacaaacagctaagtgccccagaaatccaccagccagcaggccagggcagctccactgaatgactgtggttcgcgttcccttaacctgttccaatggattcctctgcctgcagccacctgctggccctgtgtattcccctcccctgcagttgtttatctctgctccgccctgccaaggatctttgacacccctgctccctctctctgggggttctggctcctggctgatgagtgacttggccaatgccccttgcagcgggcaggtgggtgggatgttagcggggggccgttaggaggagaggggtgtatgtgtcttggggcacagcagaacacagagcgagtcacagattaaccccctggcctgtttcctctggcgcggcccggcgcacccaagcgagggtgtccaggggtgtctgggttcagactaggtcctgttcaaggaagcaggggaggaaggtcactcgtgggtcacatgtggttggaggagcagcaggaaagccctggagccctcgtctgcatacagaactcacactggcttgaattccacatcagcgcgcagcttccaaaactcctatatcctagcacacacaggatctatttaatctaatcctcacagcaacactacaagataggtattaatataatcgctagggcacagaggaggaaacgcctcagatgattgagcagtgcgctcacacagccggtaaggtggtggaaccaggaccggggacttgagcccaggcttagggagaggcctggggagagaatctgagctgagtgccaagtctgacttttcttcttcaacactcactatctctgacactggacaagttgcacagcctctttgtgacttgagttcttgatctgtaatagtcataaacatagatcttgcttcataagatgattgtaagaattaaatgcattaatgcctacaaagtgcttagagcaatagataaatgctagcaattatgatcagcacccctctgtgaataaagtctgaggacagaggctgcagttgggttgggtggaggaagtgagtgtaaactggcttgtcatgttttgctttactgaggcctcccgaacctccagggaagacaatttgaatgttctccactggaccagccgtcttgtgaggaggtgagctctcagtagctgtcttacgttgtggggaggaaggttggactggaaacagtcaaagtctcttgttttaagatttggggcctggggagtcagagctgatttttaagaaattttaccacacccgactaattttttttttttttttgtatttttagtagagatggggtttcaccatgttgcccaggctggtctcaaactcctgagctcaggcaatcttcccacttaggccttccaaagtgctaggattagaggtgtgagtcactgagcctggccttttttttttttttttcggtaaatgtacatattttcatggctcacgtgatgagttaatacagtcatataatttgtaaagatcaaatcagtgtaattgggatatccatcaacttaaatatttatcttttcttcatgctagaaacactggaattattcttatctagctatttggaaatatacattagagccgatttgtttcctgcctcccctgcttatagctgagtagccttgggccattttctcaagtgcgcaggttctcagcttcctggtccataagctggggtcatgagtcctgcctgcagtcttgtggtgaggattagatgagctaggtatggagagtgcttttacgctcccggtgcatgatagccagtgacctgtgatggctgtggtgtggtggcggtggcatggttattgtcattagatgcagtctggctctctccaggtgatgaccccgtgccggagcacctgtgccaattatccctgggccagttctgttttccgtgttccctgggtggtctgcattcttcctcctctgccctcttagtctgagcatcccttgtctgattcctggaggtatctcgggacctctcaggttgaactcctctccccttccaaggacttaattcttgaactatcctctgaccctcatctgaccctaatctgtgccttccttagaacccaagtttttgttttgttactttgtattctgagatgattaaacttacacaaaatttgcaaaaatagtacagagtttccttatatccttcacccaactccccctaatgctgacatcttacataaccatgcacggttatcaaaaccaggacattcacattgatctgacgttaatctgaggattgtagtagaatttggccagtgttcccaccactgccctttttctgatctaggatccaatccaggatcccacattgcatgtggtcatcgtgtctcctgagtcttctcctatctgggacagttcttctgtctttctttgttgctgatgagtttggcacttttggagagtgctggttagttattttgaagaatgtccctcaatttgggtgtgtttgattttctctttccatcattctttctacatttattaactggaattctactgtaaagaatggtgccttatccccattttactgatttattccattatttatttgtcagtatggacaccctgacattcactttatggatcataaactcatatggtcatttttttttcttgaatccaattgatctagccatggccaatgggagctccttgtgttggtaggacccatggttcttaactttttgttttctttttgagatggagtttcgctcctgttgcccaggctggagtgcaatggcatgatctcggctcactgcaacctccgcctcctgggttcaagcaattctcctgcctcagcctcccaagtagctgggattacaggcatgcgccaccacgcccagctaattttgtatttttagtagagatggggtttctccatgttggtcaggctgctcttgagctcccgacctcaggtgatccacccgcctcggcatcccaaagcgctgggattataggcgtgagtcacctcacccagcctggttcttgacttctcttatctactcattttattcatcagggttctccagagaaacagaacccatattaagaaatttattgtaagggattggcttacacaattgtggggcctggcaagtgtgaagtgtgtaggccagagactcaggtagcagttgatgttgcagattcttgaggcagaatatcttatttttcaggaaacctcagtttatgctcttatggccttcaattgattggagaaggccacccaccttttcaaggttagcctcctttacttaaggtccctgactgtagacattaatctgactgtagactgtagactggagtagtgtttggttaaatcactgggtactatagcctagtcaagttgatacagagaactcatcatcacactcagcaaaagttcttttctcgggagtatggaaatcatttcctatgtcaacatgggttgggtgaatgaagaatgggggggtcccaccgggctgatttgggatgaaagtgtatcattcaggtcctggcatctttcgttttcagctgtgacctttgattcccactctctgtgagggtttgtgcaaatccctcctttcatttgtaagatgggagaagcattgttcctgggtatgtaggggatcagaggattttaaaggcctgcctttaagccagagtgagaaagccaagggcttggcttcaggtactttcaggacttggacctggagttttcactcctcctggggacacacctgggatattcttccctttaaggagaggctaaggtggtgccgaccaaagtggttcctctctctgatctgagcagtttggaagagggtaacagacagaccaaagtgggtcaaccatagagcccaggcaggaattacagcttcagcctctctctctctctctctctgtgtgtgtgtgtgtgtgtgtgtgtgagagagagagagagagacaccctgagatggtggtgggaaaccctctgggatttgaatcgaaagccactgagcagggctccctaactggacagagctccctgaagttctataggctgctgggggaggatgggaggagagggagtatgtggctttccaggatttgggagggagacatggaagctagggagagaggagccttcctgcaaggggaaaaccctacatacatcccaaagacctccctcactgatggggccttggcatcctactgcttccctgggtgccagttgttttccttttttccacgaggagaaactgaggctcagagtggttcgtgattcagtagaggagtggctaccagacagtcactgagggtaaccaggtgcttttcttggtcttcctggaggacagcctagggggaaacagatcgaactgcagctggagggaattggggttgtcctaaggaggggttgtcctctggtggtagggagactggaagggggacaggggactgaaggagcagctgggactcccttaattggaatctcaaggacagaaatggttgtgttgggcggggaaaggctgagccttcccgcactggtggggtgtgtgtctggaggtgtggatcagaagctgggctgctggtacgtggaggccgagtgctagagtcccagcctgcctggcatggacctgtggaaaacagcatgggccatctgtgccctctaagaccacatctgttctcacatgccccctgccctgcatccacccctgggagccagcctcctagacctggccatgttcccaagaggctgagactgagtcccccactggtcccccttgccctccactgtcagaggcatccagctgcctctgtgttctgtgtggagaccaggagatggggctagtatcagtgagcattcttggcagcacacttgaccacccccagcctcaatttcctcaaatgtaagatagggataatgaaaataacacctggcttgcagggttgctgtgaagagctttgtaaatggtacatgttgtggggtggatgtcctgttcctggatgggtcaatgagtcggggacactccttctgccccccactcactgggtgagttagtggagggactggtggagtctcctaggaccccagtacaagggtaggtgaggggctgtgcagcggtggccctactgagagtcccttctagaccctctgcagctgctgctcctcctcctcctcctcctgccggcttccttctccaccctcctcccttcacacgtgaggatgatgataaacactctgccagctctgaatagggcctgacctcagcggcgaggcatctcccctcactcccaccctcccagccccagccgcattcctggagaggctagagctgaggcccccacttgcccctctctccctccacccacagaggcgtccagctgcctctgtgtcctccggctaatgcccacccagctgcttcccttgggccagtctcatcagaaccttgaataccaaagggcttgagtgtggacattgggtgggatagtccataataataataataatagtggttatcatttattaagcaattagacaccagtcttcatgctaaggcaccaggttttatgctaagattccatgctaaggcaccgggttccaggctagggttccatgctaaggttccatgctaaggcaccaggttccatgataagattccatgctaagacaccaggttccatgataagattccatgctaaggcactaggttccatgctaagtttccatactaagataccaggttccatgctaaggcaccaggttccatgctaaggttccatgctaagacaccaggttccatgctaagataccaggttccatgctaaggttccatgctaagataccaggttccatgctaaggttccatgctaagacaccagtttccatcctaagtgctttatgtgagttgtgtcaataaattcttcaaacaacccatgaagaagttgctattactaccattccagttttagcaggaacagagaaagtaaggtggggaggagggggaaactgaggctcagagaggtgaagctgcatgccttacattacacagctaaggaatgggtgaaaccaggactcctgggctgccgatgtcccaacagccccctccccgcacagtgcagcactaggttccccttcagcctgtctcatcccaggacacaggaccctggtcctgagagaagatgcaagaatgggaggcaagacttgctcagtggcctggggcctgggctgccatgaaaactggctgcggatctccaggtgctgagaaccttgtagaaggtttgagttcctcattctcccatcctcagtttcctagaggtgtagagttagaaacctgggcaaggaggaagccttcttcagggcactaccctaacccaccctaacctcacccaccatctgctgggcctcaggctcccgctggactggttgcttacctgcctgcctgggcggttcaacaagtgcaggcttgggtgtcaaagaaatgtgagttcaacatccggctctgccacccactggtcttggggcgttgagaaggtcgcttctcctctctcagtcacactttacctgtctgtaagatggacatggttaggtctacccatgagggctatgtggggattggagaaaatggaagtaaagaactagtccagagccacccttggtgaaaagccactgtcatcatcatttaccatcgtcattctccatcccagccatccacccacccaccgccagcgtgctcttcctctgtgaccgatgtctcccgtgtagccatgaacctgcatgctcaggatgcagacgacggtttgggaagagggtgcgtgactgccgtgtgggactgcatgtcagcttcccatgaaggggcaccttgggtgagctcactgtttcctaacggcatctggcattttctcctttcccatttgaccatgtcagttatcaccatcctacacgactgctcacttcatttaaaaaaacccagtttgcttttttttaaaccttttatgtattctaagtgatagaaggtatggtcttggtctacgatatgtttttaatttttcttgaaatacataaatattaaaataaaattgtgctatgtttccaactaagatcatcttgaatctcacactttaggaaacttggaatcagatgagctcctccttttgtgtgtgtgtgtgtgtgtgtgtgtgaattctttattatgggagatttaaaacctatacagaagtaccaagaatgatgcaatgaactcctttgtacctacccccggcttcaacaaccatccattttttgctgtttttgtttcatctgttctccctcttctccccaccttttttttttttttttttttttgcgggagtacttttcaagcaaaccccagacattatatcactttactttaaatacttcagtatgcatctttaatagataaggactttttattttaacattaccataataccattatcacagttaacatcattaataataatttcttatgatcagctactaccccatctgtgttcaattttctctaattatctcaaaaatgtcttatttggattggtttctttgaatcaggcagaagaacatagaagctgtgctctctcaggcctctgtctatttccatagtaatcatatattgacatatatcattgccaccatcttcaccggccaattggtgatacatgctgactgtttctgatgggtccttatttcatggtttttacctggtgaaatcaggagtccagtgtcggctccctctcatgtacagccttagcctgccagtcccaccgtcctgtccccaggaaggagagggggctctggaaggggctgggtgtgtatgcagagacacagtgggaggagtgcggcaccttggagtgaagctgggcagggagggggagcttgcatggctgcttcactggatacctcatctcataaataccatgtccctgagatgtccatgtaaggctgcctggctggctcggaaggggctggccaccatggggccactgggctctgggaagcacagctgccttaccggggtgggggcgggccgccctgggggtggcctcgtgggaacacaccccgtcttccagctgcgctccataccgtggtcctactcctcgtgcccccagcctgtgctttcattgctagccaaggtcctgtcctctctgagctgctgtcaagcttgggtcactgctctgacgctccctgatcccgtctccttagggctgggaaagtcacgtcccagagtccctgagctgcttccttcctctccttccttttcttaggaggcctcatgcctcagtttgactggctggtcttattgtcttccaggaaactgaggccatggggacacataggtcctcttcccagcaatctctccaggatccaaggcacctctgggaaagccacagcccttctctgggccgcagttttctcattggagaagtgcctgggacagctctagacctcattgactgagctgcccagagggacacttgagatttaggggtgcatgtgtgtgagctgtgtgtgtgtgagtgtgtgggtgtccacagactttagaactgcagccctagaacatttgtcaggttacagggggagaaagagactgaagcgagggctgttctctaggaccaccaggatcccacaggactttccagcgcctgtgtctccatcctctccccgcagccttgctccttcgggtgtttcagatccccctccctgtctttatttctttgttctttctcttttctgcgtccttgttactcccccttctgctgcgcccctcaggactctgtatcactcatgttccctccaggagcctcccttgttccccaggtctcagcccttcaccctgatccatagcccaaagttcaaagagtggccgggtgcggtggctcatgcctgtagtcccagcactttaggaggctgaggtgggaggatccctttagcccaggagttcaagaccagcctgggcaatgtagcaagacactgtttctattaaaaaaaattctttttaaccaagccaaacaaacaaaaaaaacaaaattcaaagaccccatcctcttgacccctgggtgggggagcccctttctctgacttcacagctcccatttcctccagagccttccgtgactctgggacttggtgggggggctcatgtcctccaatctcctgttccaaggacacccctcccacttcaaggcagctgcagaggccccagaacaacccccagatgcctgacattttgtgggagcgttacctgtttgtgtgtgctgagagtcccctgtctctgagcctgtaatgaacatgagttttttccctgagagggacattgtccctgatctacccagtgtcactgaaaatattcaattccaagagctggccaggagggaggattgtttgaggccatggacagacccctggcttaggacttgaaagacctgggttcacattctgggtgctatctcagtgagctccagtcccctcacctgtcaaatagccacagtcatgatgagataaggtgttgaccgcctcccactgcttaggaggggctctgtaacctcctgctgcccaggatctgcccaggcactgagtacttggtgcctgaggcagtacagtggggtgtgtgttggcccagcttggagggactggtggtggacgggcactgtgcgggaggaaggcttgtgtttgggcccacttctcaggatgaataagcttggagggactggtggtggacgggcactgtgcgggaggaaggctcgtgtttgggcccacttctcaggatgaatacagaccttcccctccttccctgcgtggatgtctctgaggggaaactgaggcccacatggtcctggggcccctggagagggggaagctggctagaagggagagtggctggttcctggccagggcacctgtgttggtggtgccaccttctgcagttcctcccagttggcactgcgggcgtggaacccacgggggtgagacactgaggctggaacgtgctgaggatgcctggagccacttatcttggcccaggaatgtgctgcagtgttattagccagcagtttctcctctttggagtaaccccctggggactatggcggacacctgtccggctctggctgcccagacagcccgtgggtacctgcacccagccgctgttgggtggagctcatgagtgtgcctgtgtgtgtgtgtgtgtacattcacggaagtgtgtgcatggatcttttgtgtgtctgaggacccttctgtgcatgtgtatgtgtggcgatgtgcctgtgtgggggcaagtgtttgccaatgtggatctttgggtcctttactcatgagagtgtgtgggcaccatgtgtgcaggaagcccacagggggcctggggaacacaaaggaagcaaaggcccaaggggtggctgggaggctggatggtggaaggagaggtcagcagcacgatgtgcaggcagggcaggaagggctgctggggctcttgacagtggggtctgcgccaccctccttggcagtggagttggcactggactctctaaggcagcatggtaaagggccctgaggccagatggcctgagtccaactcctgccttgatcactccctagccttgtgacatttggacaagtgacaccctcttcaaagctcggtttcctgtttatcatggtgataatcacagtacctgcttagttaccaggaggaataaaccagatagagtacccggagcaccctcagagctccatagatgatagcttatcatcatcatcagcatcatcgccatcaccatcatcatcaggattagggtccatgctggctgcgctgcatctcgccttggcagtctctttctggctgacattcccacacaggatgggggaccgcagctcattcgcttgcagcatagcaacaagatggagacccagagagggcatgagactgggcagggtcaccagggagccagaatagagccctaggagcccagcccctggctcctgcctccttccacatgcggcactgcctcgctctgcttagaagtttggggaggcagcacctcgccaggctggagagacaaggagagcctggcgggcttattagcccaagccagcttctgcagatggcccaggaccattctgtttgaatcttcttacaggatcagtgtctccccttctggccctaaatgctctcctgagtcttctggttttgggttcccctgatctgactgcaagtcttgaatcccacatggaaaacagctgaaacccaggagaggtacccaagggggacagctggccacctggtgtctcactcagctcctcacacctgcttttgccatgccagctctactttctgctcctgacacaggccagacgggagtggaattcctaggaggcactggcctctttagagctgggctccctctgcctgccagcacatcccacgtcccctccctcggtcctcctaggccaccctgtggctcccctagtgtagctgacccagggcgtcaccaggattgtggaggtgggagcgggctctttggcacctgggctcagtgaggtgggtgggagtgggcaaaggcaagtggaactgccagggtcccccagccagggcaggctatgattggcctgaacgctggccagagacttgtttttcacaaccaccaccaagtacttggaagaaaaatcccaaaacccaacaacagaaataaccaccaaacttttctttctttctttttatttttttaatttgcagttaatggccgattggctgtacattattaaacaggcagctggagatttgccagggtagattgcttgagccaaggctcacagcctgaacacaatgttccaagaaaacagtcacccatggggtccctggtgaggagcacccagagggcggggctgtagctgttgccccgcactctcccaccccttccgccccagcctctgctaggatcatctaatggagggcaggactgtgctgctcctggagcccaagcatccttcatctgggccctgcagatccctcactgccccaggggcccgagctgctctttccctcctcatggacattaggaacagacgtgaggctcctgcttccatccccagatggccaggccagcatctcctctcctggggaccagtgtgatgcagaggcctgagcgctgggctgggagctggagccctgtctagggttgacgtcattgagctcctccctatggtgattttgggactccatacctgtcctccctgggcctcatttccatgtcattacaaggaaaggactgggctgctcaactctaaatcctcaacattttgtgagccttgattgggtggccttggggagggcttggagtgattgtttccctgatttgggggcccttcttgccccaatcctgttcgcatccatgagaccaggatccatttctcaagcaagccctgctgggaaggggtcttcatcagccccattcatgttgttttagccagtccctccagccaccttgaagcctaccagcgtaaaggtcaagtgtccacgccatccgagttggagaacaagctgaaagtctggaggttggggactgccatcttggtgaagccagtgctgcatttgggtacatggataagatcacagtgtggtgtccatgtcctcaccaggctgggcctgctgacttctgcactgggcaggctgctgctggcttttgtgtgtgtgtgtgtgtgtggcgcgggagagtcaccggtttgggaagtgggccttaatgaaccctctctgggccttttagaggcaatatgacatagtggttaagagtacaaacttgggaatcaagtcctatcacccctgcttatttgctgtctcattatcattgactttggacaagtggcttcacctcttgcgtctgagctctctcaactgtacaaagtagggttagaataacatctactcccaggtatggggagaggagggaatgagtgaatgcaggcactggggctgtaccagggcttggcacatgttaagtgcccatcagctgttgggatctaaatgtctctccctccggccgcctgttctttcccttcaggtcactcagcacgatttgtgttgtgtgtttgtgtttgttccttcagcggctccctctcctagatcaagtgctccttgagggcaggggcccatctggctgtgttcatgttctgcctggagggcctcacagggcctgggccactgcgggcacttagaaagtacttgtggaatgaaggggtgagggacagatgggatggagccaactggaaaaggatcagaaccagagaaagaaccactgagcacctggcatgtggaagagtacagaaactgaaaaacctggggacgtctagcctgtgaagctaccactatgggagacttccagtgattgcgtggctgtgtgtgtgtgtgtgttgaataaagctttggggagatttgttccctgaagcaaaaccaagggttccaggaagcaggtttcccccagtggtgggagccgccttgaggatggggagtgagccctgagggcctggggtgtgtaggcaggggcgggcgagcccctgtcaggtcaaggagagccctgatatgctggaatgtggtccagccaggccctgaggccctgccggcttgctgcagctgctgtagttaggagaggagtagcaaacatagctgatgtctctgaacttcagtttcctcctctgtaaaatgggattcataaaggtcaatacccaatggggtgctggcaggattagaatgagttaatccccacaaagctctaggaacagtatgtcaattgggaaacactcactaaatctgagcattattaggcagggagatacatgacagagagatgaatcgtaattctgggatgggggtggtgacggcttctttgaaggaggagaatgtctggggagccaacatttatggagagctgctctaggccagatcttgcactcagtactcagagcagtgaaataacttgctcgaggttacacagcttcagatgtggtcggtgcacttccaaagcctgggatctcttctccactcctggtaggatggggccaggtttctgtgattcccttccccctggagggatagctccccatttcaaagtggagcaaggtgatgattattttctataggggtggatccgaagtcctcaggagggaagtttccagctctctccaaccctgaaagtgctacatcactaaaaactctagggagcggaggagggtgcagcaacggggagattttccctcggagcccggggcagggagattggccatgagcagagccctggaggatgggctcggggagatggaaagtgagccgaggggtaaactgaagcaggggaggggaaggaaggtgctgcgcagaagagtgcagaggaggaagagggccgtgcgggtgacagcagaggagggaggggaacagaagaaggaagagaagaagagagagaggaaccagacttggacctgggccagtggacagctctgggctttgggcgaggatgcctggctaggatcggtctccatagggctactagatggtggcaggaggggaggcctagggagtgggaaccagctggccagcaccagggcctacctgggacagcacatgtgagccaagtgttccgccaccagccagacctcctcacctcccccagcccaggagccagcttggctaaaggtcagctctcggggtgtggccagcacgctccccagtgaccagggcccacaggcctggccttgtcaggatgttatcctgttcctagcagctgctcctggtagtttctacctcttggccattcagagatgaatgggaaatggccctaggcttcaaggagttcacagatgaaggggcagagagacagtggaggtgcacgtgggcagtggcatttgctgtggttcactttcccaagacaattttttcaaggtgctgatggtgcttgctgtgttttttattatctgaaataaaaattgggctcggtttctttaacctttccttgtggtttttattcaacaaatatttactgagtgtctactgctgtcctcctctggatgctctttggcttatagggtacagaaaagaaactgacatttctgatggtgtctggtggagtagagtagaattcttatctcctttggtctagatgctaaacctccattaatacaaccaaaagtgcctgtgccttttgggggcaagcatatcctactgttagctaaactgaatttctgttttcaataaattttagaccttttgctgtatgaactcttatcgattcaggttttttatggctttggaacccttgttttggacattaccccaagaaaaatgttcccttgctaattctggctcatttataaagtcagctttgcatttcagttcacttcagcatcttagcttttcctgtgcttttttcttttcttttcttttttttttgttccttggtgtgcttggtaagcctcccttctaagttgtaacctaagttactgataagtatgttgaacaagccagggcagaggatggagccctttggcaagtcaggaagttgacattgatctattcatcaacacccctttgcttgctggctaggaatctactcagctttctctcttgtctccaggaatttcatcagggatcctgccaacaccttcctgagatacagatagtctagatctggggattccccagttatctggtctagaagcctcaaaataatgggtttgggatggtaggtgtgatgctatgggaaggagggctccctgaaggaatccaggctgatgccagtggtctctgcagggataggtccaagggaaaccctgccctggaggcagctagagccccagggtccttcctgctttaaaattatgcttctcaggggagacaggggtttgtgtgcagtactttctgccaaggaccaacgtctgcctagaaacatgtttccgggcatctccaagagaccttaaggccatcagatgaggagatcgaatccaagagggactgagaatttcctctggtcaccaagggcgttggaggctgagtcgggctggaacctgaggccttgactcctagtctgaggctcttggtgctgaacccaagtgctcttctggctagaaacaggcagggtgagaggagggaggggctgccagtgtgtgccttggggataagctgttggtgggccattttcccccgactctccttccctttccatcctctgccctgacactatggtacaaatctgagtaggaagctggaatgtggaaagcccagcacttctccttcccgaggtggggatgtgcagcaaagggcctggcgctgtgcacatttctgcactttgagagaggatgcaaatgcagatgcatgccaatgagatgtcatagaggacacagtggtgagcagggggtgcccctactcctgcctccttctggcctgagttttaaggatgagacatagaagaagacctgacattaggaaggaagggcaaggatggggggcttcagggcagcagcgtgaatgtggcttctggggtcatctctggagtgagccctagtgaggaggccccactagggggtgatcctgagatggaagcaccctgggagacagcccgaactcatctctagctgtagcggggagggcatggtcagaagagggaaggtacagctcaaatgcatagacattgcatgcctagagtggcccctggggcctggctccctatggggtgtgttgggcctagcaggattcagaggcccagaatagcctctgccccaggacatcttgggaaggaagcagagcggtgccccagtggcctctccccttgggacctgggcatgtggcccttccttctctgtgatggagggggaagaagagagtgagggcccagggtgctagaggaggcggctccagtaattgccccagagactaacacttcccacccatcacaggaagagttggggaaccgacccctccctgctgggaatcttgtcagcttttagcgcagctcagaggaacttcaccttagtgctgtaagaacctgagagtctggctccttgagtgtgggagtcgggtgatgtggtgccctccggaggtagtgctgggacctggaattcctagttgtgttacctggtgacatgggcttgagttggaagagctgcattgaaattctatctctttcattagccgctttgtgcttttgcttaacttcactgctctgagcccatctctaagactgaggtgagaatcataggcacttccacattttcacgcgcatctgtgtggagtgcacatgggaaaagcttggcgcggggcaggagcttaaatgttgattaaagtgaaatgaaggaacaaatgaaggcatctctgggttgaactccccttcctgtcccggccactgaggggccctgggtggggctggggctgagaggccagggaaaactggattcacgaagcttggaccttgccccatctttctcttgactttctcctcgcctttcttctctgcttctctgtgtcctttgtcccctttctgtcgcgtcccttctcttccagtggaagtgcctaactcagcacctggccccgacacacacaattcattgctccctgctctcctcaatggcctctctgttgctccaggctctgtcccgccacccccagctccatctctttcctccttctgggtctctgtttctgacaccctctttgtcccattctctctgctcctggctctcctgccatctgtttctgcagcctctgtctgcagctcacaggcatccactgggcgcctgctcgatgccaggcactgccatctcctttctcggttctgtatctcctcacctcttttctccctgtcttcttttcttgctcccccaccccttcagcctcctgccctccctcccccaagttccatcgggctccaaggctggtattattcagttttatgagaaacccccaggcctacccttgaagggaccaaccgcaactggaaccagatgtgcaatcctgcattggggtgggagggagggaggtagggacaaggagaggagcatgggttggcttaaggaggtggggaggaggctggggatgggaggtggagaccctgggaaccctggtcctcaggggcttggaaggaagagttgggaggagggagccagggggctgagcagacttgttcagagagcagtttttactgtgtgtgtgtgtgtgtgtgtgtgtgagagagagagagagagagagagagagagagagcgatggtggaaatgacactggggagagctgagggtagatgatgggctgcgggacagctcttagaattaaggaggaaagctgctctttttctgtgaaatcctctagcttgttgacttcctttcttaaggtttcaagggacttgctgggtttatagttctatacccaggtgctggagcaggcaggctggaaagaggggtgatgatggggtaggggatggatagtgtaacctccaaagtctcctgagagtggctggaggaggggtcttccaggtcgccccgtctcccagcccaatctgtcacagacctttgtgggatgtgtctgggatgtcctgggtcctagcaaagcctgtgtttctgcctgcgattatatagcttcaaaaataaaagtcttcatatgagtatctttggtacagcctagtgctgtattaagcattttaaaatgccctttgattcaatcatgaactgattatccatccatccatctcttcatcattcatttattcattccacacttattgagactctactatgtgtcagccttgtgctgggcactgaccaaatgaggaaaggggaagggagacaatgaacaaatcccttatcgttccaaaaatgggagccatagaagtgcacctgacccactgcatgtcagggcgttagtgagccgcggaagccccaggtgctcagaggaggggacagtgcccaccaagtggtgagtctggagaaggatccagggaggatggcttctgaattgagccctgaatgctgatagggaggagagggaatggtgtacgagaaaggcctgaccgtcaaagttggaggatggaaggagacaaggttggaaaggctgggatgttccactgcagagcttggactggaagtagcaggcagtggggagctgggacgctttgatgtccgttgggataatacggatgtgggttggaaggaagagaaggggaagatggaggattctgctgttccggatacctgctagtgggaggggttctaattttatagcacaatccccacatccacctctagagagctgaaactgacccgggatcccctaacttccctcatctaagcagagctgacccaagccccagaggagcccttagtctgcagtgggggtggcaggtaggggttaaggaggataatgttgttggggtcacctttgccgtagagttgggaccagtgagtgggagacttggtttgaggctgggccgacggctagggaggactaggccaagtgtccccatagtccatctgctttcaccatccttgccatttgtggacagcatccacactctcacagattgaggctgctgttgaagctggtgggttctggatgctggaatttgggactcagaacccagaccctctttccagctaggagaggacgaaatcttgctctggaggcagaggatgagtggagcgatgcttctatctctgccctccccatataaggtcctgagaagctgtccttctctcccctatccccaagggtttcattgtctctgactgggggcgaggcagccctccaaagtactggccatctccctgtggctctggccccacatgctccaaaatcatatcccctctcagggactcccctgtcattgtacttctggggaaaactgaagcctggggaagggtttggctgaattaataaaattagtgtgtgttaagaccggaaaagttcttaaagacctttctgtcgcagaggaaactgaggctcggaggtgcaggccactgacccagatgcggaagagaaggaagggcctttcaacctctggatgtctgagtggtgtggagcttggctgtggagccagccaggttcaggtgtgaggtcctccgcacagtcctgcttggacttccacaagtcacctctgtgctccgaggtcacgatcttcagctataataaccgggtgattagaagactaagtgagagttaatagtctttagtggccagcatctgataggtgtgtagcaaataacttttccccttcctttctaaataatcctatctgcttcttcacttttatctttcatatggtgctctaaacttttcacatcacttcccccattatttttatcatggaaaacttcatgcatgtacaaaagttgaaatgattatatggtaaactcctacaatgaacactttgatatatttgctttatcacatttctgccaatccatcttattttttgatccatttcaaagagagttgaagcatgtatttcattaactggagctcagcttaaatgacttttgaatgtacagtcacaaatgtcctaactcagcccagagaaaacagcagagattactatctcacatttgacagctaagaaaaaagcaggttcagaagtgagattcctggcctccagtcacaaaatgagttggaaacagcggaaagcagagtgctgtagaaaagctgagagttgctatattattattattatcatcatcaccatctcagcaaacattcttctccacccagaagccctttggccatttctctgcacctgcgtcttttctatagagtcttgacccctccctgcccgcttccccacccctgtcccccaagccttctggcccttcccgtcctgtccccagggaagctgctgggccagtggctgaaggaggggcagccacattccctggtgatctcctgccccaggtgtctgtgccctgacacggccttcccagagccagctagagtgcagccagcagagcactgcaggggttaaaggaggccatggctggcggagggggcccactgctggctggctccgggaaggaggcggtgcactgttggcccgccccctgggctggcctgggagggaacccgactagcagagccctctgctcagttgctcccagcagtggccctgggaccagctctgctccttgcaccccgctccctgcctggacacaggctcactcgctgccttcttctgggggaaaccagcttcttgccagccacagctgctgcctccgccactggccaccgcccctgtcctgggagtcccttggcccagacacccacctgacttagtggctcctctgcaggaaaggtgagtgaatgaatgtgcgtgtgtgatggtgtacgtgtgtgtgagtgtgcgtgttatatttgtgtgtagagggaaatggagccggccagggctgctgggctgttgatactgatgctgtcaagaccacagatcagattaggagaaggtgaggtcagcctgcctgttcccatgtctctgggtcaggcaagctgttcagaggccaaccttgtcagtcccctgtcttcagatgtttctgtggttctggcagggatgtctggggtgcggcttgtccctgctctgagagagcaaccagtcagaaggagtttcgtttgctggggaagttgctggtgtcagtggctgcttgggactgaggccagctacaggagtagggagggacacagggaccaagggagggggaagcttgggagtctcttctgctacttgcctgcccattgcagggggatgagtattttttcttcttcatctctttccctgccacccacttgagctgctgtgagggcacctttcttctaggggctcacttagctccctgaggtctgaccttggctgcagggaggggctggcaggcctggcaaggttagggttcaaagcacttttcccatctccactcctcagtgtgggccctgctcccttgcccatgggcacagactggcagaagtgccccctctgccctctccaaccactagcccttactccttcctcacccctctgggcagaaatggctaatccaggtggttaatgaacagacaggggcagctgccttccccctgctcctccctctccccccacccctcctgtcctctgactctgatgccctgcctgccacccgttcccaggctggagaatccatacagagctgacctcagtgtcagtcccccaacccccaatccaggacttgggccaggactgcctgcccagatgttttaggctggctactgttctagaagaggaaactgggtgggggtgataggggggacccggagaagcctgctgtgctcccaggctgggctccctgcaggggaggggatggggttgggggataggatgggtgctgggtggggaggagatggaggaggagggcaggcaggcaggcggttgtgggggtgagaataggagggggacctggaaactagggtgccagggtctttggagacaagggcttctcttctggaagtcccagctgcctcttcaatgtggcagcagtggggaaggtgtagggggagcaccctctcttcccctcctgaagctgcctggggtgggtggagaccatggtggctcacatgtgacctcaagttgcacctgcccctgccagctggtggccactcctgtaagcctgaatacagctctccttggacctcagtacttgctatagctggggcaccccttgcctgaaacctctggcccagggttgtggaagggagtgagggaggatgtggattgagatggagaggttggggggagagacccgaatgggatcagcactggagacccaacttggggttggcttggactctgctgcccatggagggcagggatttggagagcagtgggctggaccaggctggggagggtctcggccagtccggccgagcaccagggctgggagccagcactgtaaccaggagctgagggttcttggcggtggaggaggcaacctgggaccctctgcttccaggcgcctggccttgagcccttctggctctgcttccccatccctcatcccatgcttcttcacacttcacttcccgcaaggccccagtgaagaatttcccagggaggtggtggtgtccaggaagtataagcacagagaacctggtggccaggtggagcggggctgggttgggatgcttatgggttcagagaagatgttattgttttgcagaccaacttctggcctctgatgggctgtggctgaagccttggagtttggggaccctcaggctcctgtttctacccagataggagcaggagtcaaggggggccagaaagaacttttgtttggtctaagggagaggagcctcagaggtggaatcttggctcaggtgaaggaagagcttcctaaggaccctggtgggtcagcaggaggatgggctatcttgtaaggtggagagcatcttgtactggggggagtttagacagaggccgaataagggcttggaaggattcctgggctgggatgtggttagaggcgatgacctggatggtctcttgggatgctgagggcctgggatacttggagtcggggagttctctgacaccagaatgggggatcaggaagctgtgtcctctggcctggggcgtgggcgcagaccactcgcaggggccccctccttcctgccaatgtgtaaggaaccaagagcccgacgctctgccctggcactgtgcccctccctcacacccgtggctcaactgcctaccaggtccgcacccagctgcttcctgcaaaggttctgaggttcttcctatgcctcctggcccactctgccccttgcctgtggtgggctgcgtgacagtgtggagttgaggggacagcaagcaccacaggcttcacccccaatccctgcagttagagcccatgttccctgttgaggggctctggggctggtgtgcaaggaccgggggtgggtgctgggatgttgggcatcttgaacccctgcccagtttggcctccccaaaacaggcctccctagccagcctggagatagtagaccaagggcagtgccaggatctgagatgcagaaaaactcaggcatgggtctcatatgagcctcagtttccacatttgtaaataatgcgggttgtccgggcagcatcaagtggcttgcataactggcatggggtgaggggtgcaaggcaaggcagttgctctcaagggcctcttaggagggtgagtgggggaggagcagtcacctctcacaggcctttccaaacctgctttccctgaggtgggcagtgagaggagaaccagagagggctggggccaaagctttccccaaaccaaacaggtttgggcttcccatgatggaagtgcccgtgagtgcttccgggtgggcttgaaacccaccctggactccatccttcctacaccagccagcctcctccacagcccctctgtggatgcctgtgcccccttttctcctgaccagagagggtgacacagtaggagattgagatcacccaactcaaccaccgcctccgaccaggggagccccctcacagtcttggtttcatctgagagggaggtcctttccgatgtctaactccaatcctcttctccagtcagggactacatgaagttgctaaatgacgacactctttcctggggtttgaaagagactcagtgatggtgggagggttgtgcagggaaggatcgggagacctgagtgtgccgtgagcctgaggcaccagggcaggagcgagggggacaggcaaaggctctcggctgccagtgcctctggtttcttggctcagttctggagccaaaagcctctttgaccccaggaaactgaggcccagttgagcgatatgtttggaggtggggggcagaggagataggcaggaaagccctcccagttaccagcctccaaataaagcaaatcagaaatgggtggagggagagggtggtttttggagactggggtttgggaggactggcctagactttgtcccccttactatccaccaatggcccctcgctcaatagctccctggccagatggctcttagctttctagggctgttaggcatgcagaggtgtgggcataagtgagctgggacaaggaggtgggggtggcagggtggccagcctggcaggctttgcccacatcccctggtgacacttccattatgcaaggtcacaccggcccttccctctttccttccctccaatggtctggagcgctttcccgtccaggaggttgctggacgctagagagccccagtgcagcctctacccaggttggtggccttggccatcttcctacttgccccacctcaacttccctcaaggggagaggcttgtctctgtggagctggagcccatgtgggaggggtggtgggtgggcctgagccagtccttggagctaccgcctccagggctagtctgggctctgcagtccctgcctttttaggcctggaagcctgtagctcagccctgggtgtgggagacaggagggactggaccagcaaggcgggggcctggggagctgatgggggtcaggggtcacaggaatggctggggggaattctggccctttggccactatggggccccagacctgggtccatttcccccagggaccttcctagaccttcatcttctcctgcagagaagatgggaccccacagcgttctgtgatccttgcaagtttcccatttgctcacctgtcttctggatggattacaagctccttgagggcagacctgcacctctggcctctctggtgatccttgctgtgcttggcagagtgccgctcaacatggatggctggctaatggagggcagaggggtgagggttttgatgaggcctggtgaggatttgttagacttggactgagaggtctgtcttgaggcagagaatgtgagtctggtgccagactgctggggatcaacttatgatgacccggtttaccagctgtggtctcagcaagtgactgaacctctgtgagcctcagtttcctcactatcaaatgggataatgtctgcttcaaggtatggttgtgaggatcaaacgagttaatttatttaaaacactttgggcggtgtctggcacatagcagatgctcaatgaaggttagttattattattattattattattggtggtggtggtgatggagttctctctctcttgtcttgttgttccatctctaagatgaagagaattatgggaccagagagtggagaagatgctggtgtcattttcccttaagaggtcctaacatcagatcccagggaagaatcttctcttcccccactctgtctctctctgcaattagagggcagacagggagctgagcggccctccggaggtcttgtctgttcagggagcccatgcagatctgtgtttacagaggactctgagaaagttgccatcactgtaaacaagatgcattattataaaccagcctgagctccccttctgggatcccatcccatgccttgatgagagtcacagaatcggagactcccaggctgagcaaggacctcacctggcctccaggaagcctgccctggaccatgggctacacccatagatatggcatctacattttaaagtaggatccccaaataactgcttcaaattattgtgtcttatgccctctaggtccccccaaaatctaactggcattcctcttgatgcagctttaattcagtcccttgttggtagtgggtaggggagaaccatgtccactcttcctgcatgccatataagctgagagctttgaacccgtgcaagggtagggctcctggccacaatccctctctgtcccaggcctctgccctctctggggtctcctgttttccggtgcccctgacattcctcattagcaggggtcagccctcaaggcctgccaagctgtattctccacccaacgcagttcccacccagggaggctggggttgctctgggtcgggggtgaactccatttccggacccctggcccgcccagttgcagctgcaaaaggcattaagcttttttttggagaaagaatgggcttgggttgatgatgatgacagctggggagtgttcctgagctcagcctggccctatcttgcttcccttccttggcccctgctcacctctgcccaatttctaggccatttctcatgtagaggtgggccttatctttaccccttgaccttgaccagacctggacaatcagctggtctccagccaccctgtatgggagcagtttttgtgttcagtcctgggcttggtgctgggttaggggataggggtggggaagagggcttcaggggaagcggaaagaggggctccaccctgggtccatctgggtgggagagcagtgctcctcaagtgagcagatctgagtctaggcctggctctgtccctagcctctggaggagtcccacctgagtcccttctctcgctgggcctcagtgccctcaactgtaaatgaagggctgaaaggtgcaggggtggggggtctgtgagtccatctccccggggcctctgctgggcgtcccccagtcccaacgctgtggaacttcaccttggattgaccttgcttccctccccgccctgcccccaactctggcagtcgctggcaggaagtcctgctgattagggccctaatcaccggctgagactcccagaaatggcagagctggttgagtgagaggggccgccaagccaggaaggggggctggcatggggagaagcctccacccagggacatgagctggggttcgggctatgatttgggggtggcagagatgggccagccccaggggttggctccttgggtccggggcagtgcctgtggacccactgtggacgctgtgcggcagcagctgagtccagctgggcacacggggccgctggattgttcactttaaaagcctttgagggcatccaccctatgccagttaaggtgctgggtatgaggctggaaagaccgggagacacgatctagtggggggagtaggggagtaggggagtagacagagtgttgctgcaaaacgcagtgggaatgtcaagcaggaggcagctcatgtgagctggcagagcggaggaagctttggagaagaggtaccatttgagatggattttgaagtttggcaaggagttttgcggggaggaaaaggggcaaagacttcttcaggcacaggggaaggcatgtgcagaggcccagtggcatgcaggtaaggagaaataacaagcgtgggtctccctcccagctctgctacatgggtctgagccttagtgtctgcatctgtaaaataggattcatatttccaaccttgtagtgctagcgtgggtatgaaatgagatgctatttgtaaagttctcagcccagtgcctggcatggagcaaacccacagtatatggaggcttaaaatggcatgtgtgggaaaggatggctttggggagagcctgaaactgttgcttggggctcaagatggggggatattctgaggcaggttaaagaggggagcggcaggggattttaatacagggaagacatgatgagactgtgatttaggaagggcatttgggccactgtgacggctgtactgggcaggggagtcctaggggcaggcctcaagccagggcctgggttcctggaatcctatgttcaaattcctcagccctggggctggaaaatcctctcccaagtcacttcatctccctgatccctctgggcttccttccagcataccatcctcccctcctggattgggaggccaaggaggcccctgaaatctccttcctgggagatctttcaggccaggagagagccatccttggcaagtcttcacacgcagccctgggatggatgaactgcagcaggcaggagtgagggtagactgtaggcagcttatatttttaaggcaccgagaggatcctttgggggcctcctttaccatctgacctggaacacagtagccccttactgtttgttgaatgaatgaatgaatgaacgaacaggagtgttccctggtcagggtggaggagcctgattgctcggaggcagccatgcccagcctggctctacgtggcctggtgagtgcagagagtggctgcctgtccagagctagatggaatgttgagtgtctcaaaggccaggtgcctggcatgtcgcaggtggtcagggactgtgtgttgatgaagaagagggaatttcagcagcgtttatttcctagagcaatgacctctcatgaggcagtgtgatgtgggggtcaccttcacagtgtctgcagccacacggtctgcatgtgaatcctgaccccatctcttgcaggctatatgactatgaacaacttacctgacctgccagtgcttccctttgctcacctgtaaaatgcaggaaacaaatagagcgggtctggcatgcaggctgttctgcataaaccttggtgattgttattgctgtttttgttatggttattactattattgatacagtgggagagagtggggctggcagcaggggtttcttggctgggatgagtgcaactgcccagagtgggaggggagagcacaagagatagatgaggctcctctggaggcttagaaggaattcggtggctcacgaactgcttccaccaccacacatgtggctgcctctgctgtggccggctgagctaggccaagcgtgggagtggaggcagtggtcaggtctggattccaggctggagccctgggagagcagaggcgagccagggtgaggggtgggggctgggggaggagaggtgattggagaggaggccatgactctcccaagttcccagctgggaccctaagaattcctcccatcatctcctgccagagggcctggcccttgagctccagagcctccggagggcctgcagtccatctccctgcctcctgggcagactgttctgagtaggtggcctggagtccagtgccccttcactgttggaaagtgattcctccccagtaaccgctgtctggctgcaactccttcctccccctcctcaccctgccttcagatctcccgtcttcagcactgctttgcaacaggagggtgacagagtcaacttcaggggcctgctctgacttggggcagagagagaggtctgtgtagtgccgcggaaggacctgtggcaggggcgtcaggtgacctgctagtcccttttggcactgtgtgacttcaggcaaattgcttccactttttgggctttggtttcctcaattgcgaaatgagaagttcgagttaggggcgttctctcttttcagcagtgctgaaattctgtaagtgcatggatctttctgaacagagaggctcctagtcttggggcctttggcagagctgtccagcatcgaggtgggatcctgttggctcttcaggcatctgctgggatgccatctgaaatgctggggaggtccttccagcactggaattggaacgttctttgcccagtgaccactcctccaggcagcttgatttcttggaacagagcagagggcaacagctgtcagggttgggctggccagaatctcccgtctctgtcccagtgactcaggtggggatacgcttggcaggattggagccaatgaagcaaaggaggggactggggaagatctgctgcctgccttggccacccaaagggaacagagtgggaggaagtgatgtgctggggatgggggtgcagaggcaaagtgagtaacagttgtgagtaatggctcagtgtctccactgggtaggtggctcctagactgcacagagctgtctggggctccggaaattctccccggaggcccagccactgaatcacagcagcctgagctcctccctccctgtcctccttaggagctgggggtcccggccagcagggtgccacacctcatcccctctgcctctctgtgcttctctggatcagcccctcccatcacctatgccttcacaccccctcagctccatcgatgctctgtcttgtcttccaagcatccaggtgacttggcttgcctcaaggagtgtagaatttgcagtctggctgtcctgggtttgagtcccagctcaaccactcatcgctgtgtgaccttggccaacacatttctccgctgtaaggttcagtagcctcatatgtgaaaagaggctactgcttgttgaatctcttgttggaaggattaaatgggataatctgtatgaagtacatgttctttgtatgtgttcaaataatatggttgtcccgagccctaaactctgttttgcccttcctcaccacctctgtccctaaaattccagctacctgtgcttccaccccataatgttcaggctgcgtatcctcctatctactccaccctattgtttgtgcacctgctcttccatttctgacacctcccacccagcttctgcccgtgtgccttatcctttcacctgctcttccagaaggatgggtggggctcagatgggacaggcaagtgtgaggagaatttgctgcttgccaaggctgcagtgggcactttgaaaggagctgggaggtctgggtgtgcttcaggggccctgggctgctcttgttccccccatctctgctggctcatgctccccctgttccagtctgtacatatgggctcctttccccttctggcttcctggaattggctgtgcttggggccatgcagagtgtccctgccagtggatgtgttggcggtgctgatgtgtttctgtttgtgtggctctggttggggtggggcccaagcaccagggggtgactttgtatctgggtccggcagtggtcaggcatgtgcgctgtgtgtgccttgggctgttttgagctgtgtgtatgcagggctgcagtgtctgggtcaccgggtctttagctgatgccagctttgtcttctatccgtttaaaatctctcagtgttttccgagtcagagagccaggtcttcttccgcccctccgtttgccctcctccttcccctccagacctggtttcagatacgtgcatctctgaggtctgcctgggagcaaggaagcattacgaagggtggatatgcgtcaaatggagccaaacaatgctggtgacagccaggcctactctggccttcagtgctggctgtgcgtcaagcctctgctgcctgataattggaaatgagagggggcttcccgccactcggccccagatggatttcaaggagcaacagagagctgggctgtcctgccctcgggactttctgcttgcgggggctcctggtgcagcctcgtccatcagagcagatggggttccagaacaccagtccccgatgcgcgctaattgtgcagaataattgcactgcctcctgtcgctgccatctaggggccaggagttttccacatgagtgaattttcagataactgaagcttatgcatggaagaattcagagctcaggaaaaacggtggatttttttgatggaaagttctcacattgtacagtgtcccatgctttctttgactttgacaatagatgggatcttaaaaatcagctccttcctctccctctattgtttctcagtttcttcttctgtaaaatggggatacgaataggacctgcttcacaggggtgaggtgaagattacgtgctttgagacgcataagaagcttagaactgagcccagtgcatagaatttactggtctgtaaatgaggatgctgaggtgcagaaaatgccattaatcacctccaggttaacatagagggaagtaacatctcctaagcatattctgtatcccagacaattttactgatggcacctaagtcaactttattgaatacttccagccactctgcaaagatgatctcacccccattttacagaggggcaaactgagacgcagggaagttaaataaggtatcaatagctggtctgtagcaaaactggcatttgagcccatgcctgactcccagtccaggtttttttctatccctcctcttaccctgtagttagaaactcatggcctcttagtgtgttcaggaatctggaaatgaggacccgcaaacaggagttacgatctcatggagctgaatctgctcccaggtaccaggtttgggtttagtgcacagctgtctggagtcaggcgatgagaaaaaatgacctctggggacgtccagggaacataaagccatagatcagctttgaggatgtgggatgtttttcctaagtaatatgtggctgggttgctttccaccctgttcctcattttggccagccttaaattcttgaaaggagacataggtaaacatcagaaaggatttcctggttgtccaccacataggacagtgatacaggcagcatagggaacccgaagagtcaaaaatgtaaggcacttcttcaaatctgagatgtcttttattaaaaaacattttaacgtttccgaaaatggaatgcaccttaggatcgatgtgtacaattcaagtagccttccctcctcctcaaaaactgttactcagttgatgatgctacatacaatcaacagcatccttgaaattaggaaacagggaggtgaacacctgtggtttgcaagtaattctacaggtgttgaaagtggagaggtctctacgcccttgtcctggctggcaaacagacgatggcctagcttcagaagacaggggctgatgtctgtgtgggtctctgatgtctgtgtggatttgagtgtggccccagcctcagaattctctattttgggcctggcttagccccccgcacctaccctcacatgtccccgtggtggttggcatggtcctcagcactgcctgagacctttggctctttgggttttcccactgctcttagatttttttcccatgcacccttcctgccttactgttctagcacagctaaggtcaaagacttttgtcccttcaagtttccatctagaaacagaaacccttggtggaaagtgaggggttggggtgggcagcctcgctctgggtggaaaaacagatggacttgaatcccagtgaaatcctagccctcttcatacctccattatagcattactggggctgttttacaattctctgtttacatgcctgtctcccccaccgggccacaagtttccctcccgggcggggccatcctcattcatctgtctccagagctgggaacctggcatggaggggcactcagtgggcattgttgagtgaacacgtggtctcgctccccacgcctgtcacctcctttcacaccagttccactagaaccatgaccacagaccacagccctttccttgagcagctcttctaggaacttcctagaagctctgttctctgtgctgccggccctgtcccccagcctccctgcttcagaataggtcagggagaaggggtggggttttcctgctttttgggttgctggagaaggcgactctgaagcctgcattccatattgcctgttcacacctcctcttctagcatggcggctggcttccccctagtcctccggccgcgtgcctcagcagctctgactgccccactttcctgcccctccatcttcttatgttcctcggatcccctctttaatctctctcctctgctccctgaccagctcagagcctcttccaggctggactctcgggctccagccctacacctcacccatggcttctcactggctctgggggcatgaggccactccagggtcctggacattggcctcagcctggccctccaggtcatgtgcagtgtggcatgggttgcctctctgaccgcctttctctgtttggccctgtgtgccctgggcacagccaactggtctctttgtgttctctgacccctggcatctctcctccctacccatctcaaaggccatgttctccatgaaactttctgtgacccccgactgggaaaggtggtgtggtcctgggcagagctgaggcttcggacacagccgcggcagaacttggttcaatttccattatttactggttgtgtgaccttaggctgagaatgcaacctcttagtgcctcatttcctcatctgtgaaatggactgatagcccctagctcagagtgcgccgtattgaatgaaagcggacctgaacgtaattttctctggccagagcaagggctttgaggtggagaggtgagaaatgggagtggagagggaggcatagccaggtcccgaagggcctgatggccatattaggacatttggactttctcccgtgagctgggagctatgcaagaactttaggcagagaagtgacactgctggatgtgcattttagaaatagctccctggctgccaaatggagaatggggtggaggggacaaggcggagggcagggagaccagtgttgtaggctgttgcaatcatctctatgattaataggacctgagaaggggtgtatgtggctcagagaggtatttaggaggaggagttgcctaggcttggtggaagggaggggaaagaatgaaggaagacagacacatgggcctctggcttgaacgactttggtggccggggcgggtggggggtggagggctgagggaggggtggtgggtggagatgggggtggtggcaggtgttgtcagtgccatgcaggaaggccaggaggtggccgagtgtgggcaggatcatgaaaccaggatgctgacgggtcatgccctgggcccctccgtgccctctgacccctgctggtgcttccctgtggccttgcctgtcccggccttttgtcctggctattgcggggaccctctcaccctgccccggtaggcttgctgtcttgtgctccctgggcctggcactccataggtactcagtgcagctctgctgaaccccatgtctctgacccccctgctcatcagcacatgctcctaagaagtccggcctagtgtgcagcctcacctctcccagcttccctgattaggggtgtgggtgagtgtggcccctgagccgggacccttgagatccccgcttgggttgtctggaggctaatctccagagaagactccctgccttcacctggggtaggcccatctgggtgccatggtgtcgtgccttcttccaggctggcttgggagggcctggcttcagtggctgggaggcccatggtcccacagcttggcctgctggtccccccgagttccccttgttgttgtcagcttctgactgaagctgcccagaactccacattccgcaggctcctgaagggtcaggcacacctgctcttccctgcctcgttcaggtctggttgttgagtggcccttatgtggacctggcagctgctctgtgtgtgggtgtggttagaggtggggaggttcttgtctgaagaggaactcccctgtctggagagcccatctcgagtggcttgcaggacagggagcctagcagtgggctggggggtcagtgagtggggctggggaagaggatcctgagacaagaagaggaaatggaagaggaagcagtgggcagctggagctttggggataggttgatggggccagtgatttaagaggagctcagctcaggaggatttggggaggggtggggcctggggccttggtgagtcagccctctgggactcccctgtgtcctgtctgcttcaggttctgggtcccagcctgtgctgggtttggggaaagggccaggcccactccctgtccccactgtctttggagggacactcagggcttgggtgtgtgtgccctggcttggtgttgctgggaacaggccccttcttgcctccaggaacttgatgcacttcatttcctggtccaaacagaactctataaaagggaaggaaacagactagcaggccagggagcctggagaggctggagcaagccccggtgaaggccagctgcctggtggggagggcacaggcctggggaggaaatgggccggggcagtggccaccttctctccaggatccctcctcctgagggcctgaggctcagcctgggaggccagtgtctttgagctgtgctgggacccttgagacctctggccctttcaggcaagccttgtaatcttgtccccacaccctccctccatggccttggcattcttgcagctccttgtctgttgagcatcctcaggtcctgaaggaggcctgcctccctcctggttggcaggctaacaactggccctctcccctgggcctcccagcttgccttaccaggttgaatgggggctgtctggggccttcctgagttctagtggactcatggtgtgagccctgaagtgctggactgtccacagataggagggtcacctgcctatttcttcatatgggcatggagactggggccttctgggattattgtctggattttttctggaccgctctggtatcatttcagagaacagggctcagaagctgcctgcctcctggccacaggttcctggggcagggcccagagggtgaacagcaggcagagctgtgggcatgccaggtctgctctaagagtgggtagtggcaccctcccgtgctctgggtgaggaagagaagtcaagggtggggatgggggtcactgcaaatgtgtgttttgttagagtggagatgagggcccctaggcttcagggtgcctgatggcctcttgtctctgggttatagggtcctcttctcccccactttctccttccccttattgttattagtaatgtgactatacatccttgcttgccttaaacttcccacccttcagctcccccagaccctactcctggacatctttatctggagcatagtttcagcctggtccttctcctacacaagtgcctttactggctccccagtgccaatggctaaaatttaactccttcactgggcattcaaggttgcctatggtcaagcctagaaagaccgttgtgccatccttcttcccttcatcccttccaatgcctgcttcaatgctcctcttcctttccttcacccatcctgtgtcccagccaaaggggggcttcttgtggttctttcaacacgccaagcattcccacctccatgcctttttaatgtgtaattcctacccccaaatgtcctttccccatctctacctttcaaaaccttatccactcaccaagtgggcatcaggctctgagccaggcatggggacttctcaatggaaatggcccatgtgctgcctgctctcggggctttcaggggtagtgggtgagacacacagtggataaacagaagcaatgcatcctccatgccaggctcaggtgcccttgctccatggagcctgcctggggcccctgagttttctctgtgatcccatagccctggcacctctgccacagcatgggccctgtcccactgtagaggcagcgtgacaggtggggcaaggcaggtgtttgaatccagcagacctgggtgagccctgataccatcctttggaagctgtgccttctctggtctggcagaattgttgagaggactgcctgagaccctggaggatgtggatgctaatgcttgcctcgtgggtggttgtgaggagtgaagcgatgtatacacaaaagcttagaacagtgcttgacatgcagagagcttagcaatgaacacttgctgccacaatgactaccactagttattccacttggggtaaattgcttaacttctctgagcccatttacctgaaaaacttgtcaagaagatcgcaaaaaataaggtatgtaaagcacccagctcagagacacacagtgggtgctctacaaaccccagtttccttccctcccatgtaacttttggggcagggatgtgaggtgggtgtcagcaaagaacttctctggaagcaacccaagtgtccatggatggatgaatagaaaaacacgaagtggtgtaatctgtacaatggaacagtattcagccttaaaaagaagttctcatacatgctacaacatgaatgactcttgaaaatatgatgctaagggtattagtctgcttgggctgccataacaaaataccatacgccgggtgacttaaacaatagaaatgaattttcttatggttctggaggctggaatccagaggctgagatcaaggtatgagcagtgttggtttctcctgagacctctcttcttggcttggagatgccgccttctccctgtgccttcacatggtcttccctggtatatttctgtgccctcgtttcctctacttacaaggacaccagtcagattggattagggcctcattttaacttagttatctcattaaagaccctgtctccaaatacagtcacattctgaggctactgagggttaggactttaatatatgaaggaggacatagaattcagcctctaacactaagtaaaataagccaggtatcaaagggcaaatattatatgattactcttataggaggtacctagaataggcaaattcataaagaaagagagtagattagaggtaaccaggggtttgggggaggggaaatgagggctagtgagtgtgaggatgtttgggatgatgaaaagtttctagaaatggataatggtaatggttgtacattaccgtgaatgtacttaatgccaccgaatacatttagaaatagttaaaatagtaagtgttatgttatgtgcattttaccacagtaaagaaaaggggactagcaggagatggtggggggaccccttttccactcagtcttatatgaaatgctgaatgcccagatgcacgtgggtctcgtttaagctaggggcaaagctgtcctctccagtcccaggggccaggtgagtgtgagtgtgtgtggtgagcccctttggagggctgggcaagcttaggagtttgggattttacataaccaaggctgagaggttggctctttcttggtggcctggggacaggagtgtcacccagttggggccctggtcctgccacttgcaggtttgggaggtgagaggggcagtgctaggcagacgcctgggttttctcttgatctgcaaagagcagtgcctggagtccacagaccataaaaatgcctggagtccacaggccacacgcacaaaaaaaagatttatttacatttttaaaaggggtttggtttgagaaacatgtaaaaacacgacagaacatttcataggccattttacacaataaaataggcaataatagcacttatatttttgcaagcataaacactcaggagtttaatgatagtcacactggtataacgattatgagcagatgaaccgtattcataaagaagtaagcaaaagggaaatgtacaaacacatattgctgtggttggtaattgtgtacccctagctttataactgcagtcacctgaaataccatgatgagacaacccaggtcttatgatgagactgatcaaaaacctcagtgggccaccactgcataaccactgcgccagacacccaaagggccaagatctcaagaaattttgtctttcacaaatgcaggtgtagtgggattatgatctaaactccttcccagctgattaacctgggcaaacttcatgaccttgtggagcctctgtttctccatatgtgaaatgggagcaatattgctgactctgcgggcttggagggtctcggagagatcaggtgtatgacaaaattagccccagtgcctggtgcatagtaggtgcttaacaaatggcagcgattgtggccacaagtggccacaggtgcctcctttctttaggccttgaatcactttcattcttcaacagacatttattgtgtacctactgtgtgctggctctgtgctggactagtttgacggataagatgtgcttcctgccctcatgacacttgttttctagaggaggaaacagattatagacaaggaagcacacacacctataattacaaattgtaataaggtctgtgaaggcagagatatgagtgtgggagagagaatattgtgtggggctgtgtgtgtgtgtgtgtgagagagagagagagagaaacataagggaattagggagggtctctggggtggtgacatttaagccaaagccagaaggacaggaaggacacagctacgcagacagctggaggaagagcattccagacagagggaactgtgtactcacaggctccaaggaagaacagaactaggtgttggagggattgaggggaacccacctctgtgtgtggcttcgggtcccggacaagggggctgagcatagaacgaagagggagaggagggcagagcctgggtcatgcagggagttccctgcctgggctggctgctctctagtgctttttccctcatgtcctgggggagtctgcacgggtgtgccctgttgttggcattgtgctcagggacctttgaagttgagaaaatactagtgggtgtgggggctgacgagtgccaggcatcagccctggtctgggaggctaccatgctcaccttccagctgcacccacggggctccacctcgcagcctccagagccagactgctctgctgcagtgctgggcaaattgttaacctttctgtgccttagtttcttcatctgtgaattgggggtaatagcatccaatgagagcaaagggcttggtacagtaactaagctttggttagtatgagcaaagggctgagtgtagacatagtgcactcactccgtgagcattgttcctgtggctgtggatggctccgtggatgtgtgtgtttctagcatagaggacaagagcatgtctccagacccggaccctgactttgcatcgtgcctcctgttggccaactcattagcctctatgtgcctcagtcttctcatccacaaaatggggataataatgacaacgctcagcattgttacgtgaattaaatgagttaattaatgcaaactgctgagaacagtgcctggcacagagcaagggtgatgggagtttatttgctgctgtgatttttattgctatgttattgagagtgaaaagattgagcaggacaccctgtcagttcccaatgtctaaatggtttgcttgaggtccactgggggaagggggcttacctgaggctgactttctgggtctgagccctggaatcctgcactgacagctctgggaggtgagcctatgacagcgctggcaccaagaccccctatagccacccccagagtctgccccctgcagagggaggcttccttacctgggccccctggggactccaggactgtggggccacagggcatgggccatagagtggcagggggccctggctctccctggcacattccgggctcctgagagggtggccaggggccagggtgccggagagaaggcgagagccttttaaggaaacatttctttgcttaaaaaaaaagagagagacaagaaacactgaaacacacaacaaagtcagtgggctggccggccagtgggcctggaatgcacggctgtgggcggaggatggaggacgccgtcgggggtggcaggccacgagggggcaccaaggcatcaggcccttgggctggggcttgacagctcccccgcagggccaggttcttagggggtgcctctgcctcgggaggccagggaagggacctgcggtcaggatacctgggccccctcctgtccactgcctgagagtaggtctgggagggagaccttcctcttcgtctcagagaacacctgtctcttctgctgctggttcaaaatgtagccataaccccctccctcccttttccaatccccagcttctaaatggagagcagaaacacacctcctgtgagggaggggactggtggaacctggggccctggcagtggcaggcatcagcccgtcctctggcagcttggcctggctcgcggtccctgcccagcccaagctcagaaaaagaacacagcaagggtgctgtcctgggaattgtactccctcccccaggactgagggacccatggtgacagagtgggttgggagaaggcaccctggggccctggcccctgaccttgaaaactcccagtccccagagcagggtttggtgctgtgcttggcagggacagcagtgtcccccgtagctgagacctggtctcgtgggcagggtaagcagagagccctgcaggccacagccagctctggggacctccccttcccgcccagtctgttaccctggcaccctctcccccagccctgggctctgtctctcagaggcctcttctaaaacaatcactcatagccccgtgctggtgtggattaaggaccccgggcttctgggggcagttctgttccccctgtgtctcctcattcttccgaaattggggccacgagtgataagcttcccttcacatgtcatcttgggacttagactgcctgggttcaaatctcggccacttatcagctgtgtgaccttaggcaatttaacccatccatgccccgcgcaccgcaactgtgggaataacaatagtaacccaccttactgggttattgaaaggattaaaaatgttaacagaggtaaagcatttataatcatgcctgtcatctagtacacactcaatagtattgggtattattgttgttggttctgttcggccccctgttcttctcccaccagtcctagaattctgtggagcaaagaggaataaatgctaggactccatttgggcctctttgctggagaatgagttgggcagggagtctgtagcccgactgtgtcaaaaacccaggaatgccaactcccagccacctctgccccttccagagcttggagcacactgtcccacaggtgctgaccttatctgggctgctgtgtcaagcctggggaatccctgggctgctgggatgacagcatgcggtcagctggaggaagggctcagctagggtgcccaatgcccagtcagtaccagctggggctgggctgagggctcttgctgccaccactccaccgggctggtgggtggggaggggttgcccactgtctgggggaggcagctaccccctctttggacatccatggcttgttcccagataacctcatgcccgagggacagtctcccactctgtgcccactgtgggccccttgcctggtgttcaggttgggaatcggagccaaggttgaggactgagctccaagaaaaacgtgtcctggctagaaaaaaggagcacattcagtctctgataaatgcccctgctaattgtcagggtaatggctcgcctgccaggcctggccaggggaatgttatctcagggaagggagcgatggagccttccctccctcccctctactctcctcctccctctcgctccctcccctccactctcctcttccctctccctccctcccctctactctccccctctcccttcttccctctgtctggaagttcaagttgccatctccttctctggatcagagaggaagatgaggatcatgaaactggtgaagatcatagctcactcccagagagtgcttctgcctctccaagccttccacatgtgttagccacactcatggctttctttggaagggctggtgggtcccttttaccaacccatttcatgcatgctccgggaaagtgccagagctggtaggagccttctgcagctctgacctttgggtgagatcccttagcaatggggagaaccaaggaggtgactctcccttttctgatgatggtcctaatcacagtttttaaaaatgtaaaatgaattttaccatattgtagaaaattcaggacatagagcaaaaaaaaaaaaaaaaaatccttcttcttattacctgaagcttctgttattgaaatgccggtgcagtgatctccagtctcccagcatgtgcatatttgtcacagaattttaattgtgacgctcatttcatttttgccttctgcggcccccgctccctttcccaggcgttattgctggagtagtttttctgtgttgctccatagtctgctgaagaactctcaacccagaaggtgtcagcccgtgtgagggaatgaagcagggggaggtgtggggtgacctcaggaggtgctggctgtctctagagacaagatatgctcacctgcccgttctctgttccttccacaggtggctgccccctgcgttcctccatccaaccatgagctggtggtgagtgacagcccttccttgccctgcaagccctgcctcctctccctccgcagctcccagctgcagctttctttagacccaaatatgttggtaactggggtgtcggacaattaggtggaggaggagggtcgacctccctgggccgaagcgggcctgggaggaaatgagtcatgaggtcccttctgatgagatgcagtgcctgctatttccaaccttgagacttgcgtccttagaaaaacccataaaagggcatcttgtgtgtctccaggcctggccaggtgcctgttgtcccgggactcagaggaccaggggctgccacggcatctccttctgcctgcctggtcccgggtcaggcaccctggggctggaggcgggggatgaccctcagagtccattcacctgggcagtttttccctacaggcgacctctgttctgcctctaagccccttggcttgactttgcttttctgctccctttccatttcccccactcctcttcccgtcacccccgaatcagccttgcaccatagcctggactggggtgggatccctgtgagttgtgggctgtagagagggccctgctccaccctgatgccagctgggctgatttggcacactgggcactcttccttcctgcctctcgccaccttctcacccttcagaggtcttcttcctccccaccatggccctagaagcagacaaggctctgggcgctgctggggaaggaagggggctgcctgcatgcacctgtgtgcctgtgtacaggtgtgtgggtgtgtcccggaaggacaccttgcgggcacaatcggatcaggctgtggagttgcctgtggcagtactaatgtcggcaggagcctggggcggggcgtggctgtcctggggcccaggcagttgtaggtacctcacacacctctgttgtgacttgctcagcccagacactgggtgctcagtcaggccagagtctccttcctttcatcaatatccacttgctgtatgacaaggggctggtcccatcctgtttctttctggacctcaattttccttgctgtggagatgctccaaggggcccctccatgttgatgagtgttccctctccctccctccctattcagggtggtgatggagtgaaatgaagtgcacagaagtgcttgggactctaagtgtcactgctctgcacgctcgggctcaggcctgctggggttgtttaccttctttgcagtggtccctccttccctggtctcactagggccaggctctcccgggcctcagtgctgcccagccctgctgctgcagatgtggagtgttattcatacggagcccagtggagggtcatctggcaacagcgggggctggggggtggagtgcagtcgggcttggaactgccagcaagaaatcgcgcttggattgcagagggacaccatgggagtccgaggagggcgggcggggaggggtgagtgtccatttctccttattccagctgaactcccaccttgtggctaagaacagaatgtccttggctgctttatgaggctgggggttcagggtttagggaccaccaggcagaagctagatgtctggctgctgggagtctcatgagctttgtttacatgaagagcggtcagaggttaggacaaaagggaataggttggcattccagctggggggactgcagttagaatccagaagagactcgtgcctgagcaaggctgcgtgtctctgtgaggtgccccgcctgtgcagggggctctgcccttcgaggaggctggatcagccacctggtggtgaaatggctgtgtcaccagacggtgctcccagaggctcccctgcctgagtcacaacccgcctccccagcggtaaagagcgagggagttagaccacctccttctgcatcccagctcccccgctccctggtgtacgaccctgacattgctaacctccctggacctccgtttctcttcttcataatggacgttagtgacggtacctatgctgtaagcctgccaaaagaccaaagtgagcacattaatccatttaattcatgttttccaagtccttcaatgctggcccacctcactggagcaaaagctcaggttcttccgttggcccaagcagccctacgtgacaggtttccttttgcctcagctccttctcgttcacccgtgtcttgtcattttcctctctcacctcatctccttctcagcacctcactcattctgtttcagccgcccggccttcctgctggttcttgaacatatatgatgcctccaggcctttgcacttactattccccctgcctggaatgctcttcccacagatacccacaaggcttttcccccagtcgcaagtctttttttttttttttttttgagaacagtctcactgtgttgcccaggctggagtgcagtggtgtgatcttggctcactgcaacctccacctcctgggttcaagcatttctcccgcctcagcctcctgagtagctgggactacaggcgcacggcaccacaccttgctgatttttgcatttttagtagagatggggtttcattaggttggctaggttggcttgaactcctgacctcaaatgatcctcccgcctcggcctctcaaagtgctgggattacaggcgtgagctactgcgcgcccggccgaacctcaaatttttattgaagtgtcagcatttccctttccccagcacccagtctcccttccatgcttccactgcccctcagcatgcatcgccccgatacactatgcattttacttatttatcttgtttaaggggttttgcccatgccagcatgtaaactccattaggacaaggaatttttatctattttgttcggtgctgtgtccccgctgccttgcacacggtaggtgctctatatatgtttcttgaatggctggaaggaaggcattcagcccgatgtctggcagattaggtactcaataaacaggactgctatgactccatgttccctagctggtgaatgggtggggctgttgagtcctaaaggtggggggccatgggggaaggtggcagctgccttcagctggaagctctgctactgtccctggggagtgggaaagtggcccaggggaaaccgggagaaagtttggcttccccaggagcactcagcacctgtttcctcacgggcgggcgaggcaagtgctttgaacaggttcacaagagggaggaaagggcgggtttgtatttttccttccttttccatttgttgcctgcccttcagcctcggtaggctgctctccggcctccctgcccattctctgtccctcatggtgtgtctgtccttctgtgtgttgtgttttcttcatgtctcagttgagttccagctctctgtctggacttctcactgatcttgcttaaattccaacccctgggattaggacctctcatcccagacatagaatttctgcccggcttcaggccctgccagccaaatacatttcccaacctgtgcccgggccagccagggtaaagtggcttaatcttcaaccatgttttcatcttactcaacagatgttgcccaaggccttgggtagaagggacctagggtcaccaccctcctgtggggcactggtggggcaggatggagaggcaagagggcttgtttgccacggacactcctgatccttgcaaagagctgaagcagcttttctcaacttctgaaaaataagtcaaaagaatttttcaagggtgatcgccaaatgggttggccaccaaggtcggcggatgtcaggtcttctgtgtgcgggagagctgcactgggggtggaatgatgtgcacattgcttctacttgcccaggcaggcccagcacaggggcttggaacgtccctgtagaatgacttggaggtctgcaggtcagggtggggggtctggaggggaggaggtgaatgggggaataggaattgcccagtaggaaatcatgcttggattgcagggggacaccatgggagcccgaggaggctggtttcactcataatagtaatagcaacagtgagagattaaccctttactggaacttcatatctgccgagcttcgttctaaacactttacaaaaataaactgatttaatcctgattacagtgcaatgagggaggtgctgtgatgatcccaatgtcacagatgaagaactgaagctgaaggccacagagctatgaaaagggggagctgggattctgacacggtggtctggcaccagagttcaccctcctaagcatgaataataactgacgtcactgtcacttgcatagcacttgccgttttcaaagccttttccatgacgtggggccattgggacctcacagtgacctgtgtggaagcctggcaggcccaagcccaccctgagaagacaggaacaaactgtacatggagcaaactgggtgccttgttcatggtcacacagctcgcagtggcagggctgggtcaggagtggattcttggtctgtgtttctccccaggctgccctcggtgcttgctcctgatttaagtacccgatgttgccgggtgatgggcttctcctgagcccctctttctaaacagctagcttctctgtttgccagtaggcttgggatttgagggagggtctgtccatccatgtaaccatccagccatcttaccaatacatatctctggagcacctaccccctgggcttaggacccctcagtgccaggcactgttctacgtgctggggcttcagagttcctttctgccacagttgtcagtgcttcttgaagacagacgggcatggagtagacctggagccacagggtggagaggactttggacgctatctagtcccatcctgttcttttgcagataaagaaacaggccctgatcttcttaagtgactttctgaaggtctcgcagtgtcagatctgaggcattgtgctgcctcatggaagcagagaaggatgtgacgttaactggaagcagagaaagggagcggagcactcagcttcagtgtgcgggctcgctccatcaagggtgatgtgcagtcacttcagtcagcctgaactccgacccgatgcatttcatcccaaggcactgggcaggccatgggtggccatccttgggaaatcctgaaaaaatggctgattttcaaaggggaggggcaaactctgagcattgcattcccaagaggatgctgagcatggggagggaggttgaaaaccccaacttgtgcaacccctagggccgcttagcctagagagagaagacgtgggacgggcacagaatgggagtgagaatatgttgaaagacaaatggattcattttccattgttctgcaaagtagaacttggtaggtagaggtcctcagaaagaggaggaaactcagctcctcatttgccaaaaggggttcaaagtgctccttaaagaacagcatttaggctggatgcggtggctcacgcctataatcccagcactttgggatgctgaggcgggtggatcacaaggtcaagagatcgagaccatcctggctaacatggtgaaaccccgtctctactaaaaatacaaaaattggctgggcgtggtgtcttgtgcctgtagtcctagctacttgggaggctgaggcagaggttgcagtgagctgagatcgcaccactgcactccagtctggcgacagagcgagactccgtgtcaaaacaaaaacaaaaacaaaacaaaaaaacccaaaacattcttactgatacctatcaggtataaggcaccatgctgatggaagcaccagctccacagggagctgcctgggtagaagtcctcaggctcactgaggtcctgtcatttggctgcgttacaaagtgacaagatccacagaggtccaggcatccctgaatgtgctgaatacctcccctgtaatccccactttgaaaggcccaagtagggtgaagggttctgacctcagggaaccctctgttcagtgggagagggagaaccacactatggaaatagtgcctgactctggggttttgaccagaggtggtagccttggtgttcaggggaggaagtgatttgcttgtgctgtggtggttggggaaacctgccttctgttcaagcctagtttaagtctggaacaaatagaagagaggagggaaggagggagggcgttttggaaggtagcagggctgaaacagaaagggcgtaggaccttggtaccaattgctgagtctgaaagagggccaggcaatctagtgtaaatgttttgggcaagtctctcttgctggcgggaagagagaaccaggcaatcttgtatcaccagggcccaaacaacccttggtgaccctgcctggggcttgtggtgggagcagtgtgggtgcaggaatgggggcagggatgagcgtgacaggcctggtgggcctgagcagctgtgaacagaggctgcatgctggagaagagagagcaagcagtggagtggctggagggagaaggggccagatattggaggagtccacaaaccacactggggaacttgaacttgatgtgctaagcactaagggctatcctgggtccctgagtggggaagtgacccaaagcagggtgttagagctgggagtctgctgccagtttcagggtggcttggcagggagggaccgccaggggagggctgagctggtatagatgctcagtgtggcttcaaggctgcaggcaagggtggctggaggggtgtggaggaagggcacagccttccagtgccctggccaggtcggggaggagagccatatccactgaaggacatggcaagagggaacacaaaatattccaacctgtgcaagccggctgcattgggggtgtccacagttgcacagcctcagtcaggatttgggtgttgggccccttggggtgaattaggagaaggggctgaggacaggtgtggtctggccagatccttcccctgtggagaaatcagacataactctccccttaatcacatggagcctattcttttcctctggtggcctgggcctgctgggaggggatgtggcccctggagcaactgagcagatatacttcagggtcccaggctccactgccagcatcctctgccagccccatctgctcagtgctctttctctagccctcacccatcggctcccacttcctcaagactgagcgaggggagagcacagggctctgggaggtgcagacctcagaggtcttagactcggaggcgcagatctgatctcacattgagcggccaccctccctggaaactccgtctcctcatttgcagaaaggtgttcaaagtgctccttctagagcccttgcttatgacagtgaagggaggtgatgccttgggaggcacggggcacggagaaagcgctctctccctttgctgccttctgccgctgccgctgccttgttttcgtgattaggctgttgatagagggctctcataggtctgtatgtggggacgattaaatggggccgcacctctaacgtgccatctcacagcctgccatgctccaagtgccccataaactctgtttccctgcccttcccttctgtttttagccccctccttgcatttgcttatgattctatttttgaaacaagtgagcctagaataactttctctgggtcctgggtctgaggccattccagccctcgctagccctccctgccagctcccagttccttcccctcttgataggcagtgcgatggtgacctcgcagttcattgccatggcagtagatctggtcatggggtggtctttttggcccccaagccccccagattccaggcctcccagggggcaagagtcgggagagttggagggtggaaaggggcagggtgtaaggaatttccggacggaatgttcctccggaggctgagcccgcattctgcgcaccctcctccccaatccccttcccctcggccctgggctcaggcatgggaacctcccccaccctgttgtttccttcctctaaaacagcagcacagatacatttttcccagcccaccctccttgcaggccactaacctgtcctcctgcgtgagcctctaggccgtcctggcagccaccccccaaccttccagcagaaaggcccctcctggccccaccttgggcccatgcagtgggggagggtaaaggcatgtgtggagagggcatatgtgtctttttttggaaaaaaattgaggaaaggatgtggagcttcccttatccaccctgtggttcccgacccctcgaattcaggaagttctctctgttgtctgatctcagtctttcctatgcagcccagttcctattctttctgtggaagtatggttaagaagtgtcttcctactgaggacctggacagaagtcctgctataactggccttcaattttcagaaagcttgttccccacaggaaggcagttatcagaggaactgcctggagatcattgccagggagaggggagatagcatgatggggaggtgaggagcaaggttcaaacagcagctctcctaccgactggctgtggaaccttgggtgagtcactacatctcccaggccctcagtttcctaaactgtaccctgcggtaatgctcgcctcccagggtggttgtgaggactggtgatcaggaaagcaaagagcccagtactgtgttccgggcattgccatccctaaatgaatagttgtaattcttgcaataagtttatgaaaaggcatctcagggccagggccaggatgagggccagagagtgaggcctctagggtgcaagatctgaggagtcatcactctcaggattatgcaagtgcactcgcaggacctcagagtgagagcaatgccttcttaaatgttgtgccccaacattcgccctagtccccaccttgctttgctctaactgctggttttgggactctagagcagagcagcccgctaagagcagggcttggttttcaggtagtgataggttcaaaccctgccacctgcttctaagctggattctgagttgtccctcctgggaggtaaggggggactctggaagacccctggtggaacagtgagtcagctgctctcactttggaaagcctggggaccttaagctccaggctttgtcctgggactgggcagtgggtggagacagacataggggtctgtctgtgtttggcctccacccacttcatccctttgcagctgacttgaggaggaaggaaaagaagagcctgcagggaggcaccagctcaccctgccagcaggatggctgggggccaagggtgagggcagtgagatgagcctggcagtgggctttacaaacctgggaaccagctccagccatgccacaaacctcaccatgaaaggctgggcagatcagacctccctggacctcaatttccccatgtgtgaaacagggggatggaggagatgatgtcttaagtccctctcagagcagatgtccccaggagtggcatgcaaggatggttgtgtgtgtgtgtgtgtgtgtgtgtgtgtgtgtgtgtgtgtgtgtgtgtatgtgtatgtggtagctgtagaaacatcctggccaggaatggagtgaagatgaaggtcaggggctttggttccagagggtcccgggagtgccagctggactcattaggcagtgtcaatggtagggcttcccactggccccggcctccctgcagggcctggggcagtggcagcctcaggggatcctgccctcctgttaccagtcccatgcctttttccttcccagtagccccaaggctggaagtgttgggaaacagagagataggacttgaatcctgggagagttgggttggagggcagaggagggtcgggcagcatgcatgctggctgtgtttgcaaacactgcaggacaactgggatgtttagatggtgcagggggtggggacttggaaatttttagctcctcagaaagcatctcaaccagtaagctgaaggcatctgaactctggcaagcgtcaccctgtggccggcctccagctggcatggggaaggggtgggggcaaaggggatggtgctcagatgatcactggcaggaggagaaagtttctcttgcactgctgaggcctgtggtttctaatattgacttcagctcccttgtgtgcaccatgccagacccaggagggttggggcaagagggtcacagtgaggcagggtgggctggagagggcctgggcctcagggatatgaggtgctgccccgaggctagagacgataaacaatagtgatagctgacaagtattgagagctttctagtgtcttgcactcttctaagtgctttatgtgctttattgcatttgatccccccaaaataaccctgtgcgggcctgttgaggagcaggaaggacaaggtgacctgcttaaggttgcatagttaggtagcagccgagagaattagcatgtggacctgggcagtctgctgccaaggccttttagggagcagtcagtccaaatcctgccacctgctcccaagctgattccgagttggagttgtcctgcctggaggcaagggagctgttagctgaggctggttgttctcggagaagcatctgggacctgtgttgcctggaaacctggtagaaatgcacgtccttaagtcccaccgtaggtctaactgtgtgtgtgtgtgtgtgtgtgtgtgtgtgtgggcacccaggcacctgtgggtcaacagccctctaggtggtgctatgcatgttcaagtttgagacccctgggctcatgctctgctgagggtcgaggcctattaggaggctttaaccagaggaggaagagaggcttttctgggccctgaacgggcctggggcaggtgtagcatctctagcttgtccaccctactccatgtctgtccattctaggaggctgggtagcggacaggtcaggagtgagggctttggagttgggggatttgggtttgcatctcagttccgctgtggtctgccttctgggagttcccttccttcccacaggagaccagagcagctctgagacgaggcagctgggctgttctgcccaacctcaggtctccacgtgggaatgacagagcccctggaaaagaagggagaggctggagggtagagagggcctggggtgggcgacactgctttagcggggagggggtgtggggggtggtccctggtagaggggtgggtggggctgggttgttggcggctgaggggagcacctggtcctaataagcaggcagctccacgagctctgacttaccctgagtgggttaggggattagtgggttaggattagggctgagctgagagagggcagaacgtgccatcattattcctcctccagagccatcctcggactccaagtggagagaaggtggtgtacctagcagcagggaggatagtggaggagaggtgtgggaggggttggcccctgtccccccaacccctgtgcctggaccccgttgtccctctaccgtccccagctgccttggccctgaactgctcaggaagtttcatcccctggagagtagttttggcctcagccgcctgtcttccaggcagtaggggtagatgagtctgggccatttccagagagagcactgttacctccgctcagcccagtctcttcctccatgcctatctgtgcccactcctcctccctgacgccggaaccttttagaggatcattctgtccattcccctgcctttggacatgagcagctcatccctcagctctcagggatggggttggagcaggcgcctcttgtgccgagacacatggtcttaaacctgggtcacacttgtcctcgtcaaggtttgcttcacaaccattccagttgtgctcaggcctttctgcccaatttgagggccccataaccacttcactgagttggaaacggtggatcagaatcctctcagattctgatcaggaggtgaacctggcataagaagtttctcttcttgctatggggagaaatcaaaccatctttagtaggaagcccttctgctgccctgagtgaagaaaggagggtgccagagtgagggatgggatcagccaacaggagtttattgatggcccactatgcatacatccaccctggtaggagggagtttccaaatgaattggtccaaattttgcttagaatctattttggatgaaggtggaataagaatcacaaataaaacaatagttggggaaacaagtcatctattcccatgatgagattattcatacactaaggaccagacagggaggtgattggagttcagaggtgggaaagagatcctacttgctggggtggccagggagggctaactggaggaagagagccctccttgtaggaaaagaagggaaagcattccataagtaaagacctggatgtgggaacaggcaagaagagtttaggggctggggctgatggagcagagcctttgtgcttggaaatggaggtgtgtgaggcccagtggtgggtggcctgaaagcccactgaagtaatgagactggctggctgcactatttcaggctgctgggatttcacttagagccccaagatggggttcaaatcctgccgtctctattagagttgatgatgttggctcagtcatttaactttcttatctgtagagtggggataaaaggtattaatggtactcacctccctggattcttgggaataaatgagatgctgtaagtcattgacctctccaatttgtggggtcagcaactgtatgaaccagaggcctggcgccgggcactgagcgtgggtctttggtgaaggtttgtggaaccagatggttctagcactattaggatggttttccacatgtcaaactctccctcctgtgcttggggccagccagattatgcctgagtcttgggttggcctcatcatccctgtctcagggggcattctgcccatcagggccactagccatggggagagagcccatccctgggatgtctgccctaagggctcatgctgtttctccttctgtccacagcccatcaccactgagaatgcaccaaagaatgtagtggacaaggtgagtgatggcaggtggtggtgggggagctggaacagcctgggcaggtgtgagaaggctggaagtggagagtggatttgggggagagtggacagatgtggttggggaaatgcttccggagtagatttggggaacttgcagggaagtagtggggcggctgctgactctgggagaagggcatctgaccatccctgtgtgtttggaaatgggctgctaggcaactgggcaggcagagagggaggggcagggtgggagctgagagggagcagccggtggttaaatgtgggcttccttatgaaatatgcagaatgcaagaaaatcaggcggatctttccaaacaggtctttctgagctagctgagagttggacagtttcctcaaggctatgcggaagatgaagggaggaaagtaggtgggttctgccatggggaaactgaggttagctaccgagagagatctcctggcgatggccagcaggaaatcatgggcttggagatgaaggacttcggttcaaatcttgactctgccaaggttctaattatgtgactgtgggcaaggcatgagcctgtctgtgcctcagttttcttatctgcaaaatgagaataatagtatctcccacaggagtggctgtgagttgtaaaggagaggatttggttagttctgagggggccttgatatgggcaaagaaatgtgaaacaaagaccaaagttctttcccaggcccctctgccaacctcctcatctgccgctcctgacaaacccagcaaggtgcattttgattatttttcttgcctcccctctctgactgccttttctctgtctgcagggagaaggagcctcccggggtggaaacacacggaaaagcctcgaggacaacgtgagtgtggatggggagaagaaggatggggctgggccctggtggccagggggaatggggtggggtgggaggtggataatgtcttgtttcgtgggcttcctttacctctctctagaaggagaggctggcattgtgggcaggcccatttccttacaggctgggcctcagcctttggtgctgcctccatctaagcgagatccagagctcattcatcagcgactgcgccaggcctcggtgctcagggcgggtgggaggagagagggtgtgtgatgagtggccatggggatcaaggggaaatgcgcaaaaccacagcaagggaaaccgagggctgaggcagagaaggagccctgactcttggcggggggtcttagtccttggggaagtggtagtgcttccctggagacaagagtcttagaaaatagcaagctccactgtgtggcttagatgctattggttcaggaggaggctgggagatgggtccacgggtccccatgggctcctcctgcctcccattttggggagaggggaaggggcggatgcctgaaatggaaggatcccacagaagggctcggggtctcttccaggacgtgctttgagccccgttcggggttggtcttgtctccacaccccaggggcagactcccagcacagtggggctttgtcttttcttccctgcccctctctgaccgtactccctgtgctggcccctccgtcttcacccgccctgggctgcagaggaacagggagtggttttggtggttggcacaggggtagatgttgatggcacgaggccctatcatctgacagctgcctgacccacggtggggagggccctggagggagtgctgcgggagcaggaggggcagttcctataggcagcctgactcccatggtgagcccactgccaccaccacattgccctggggcagccctgcatgtccagccctacaaagcggcagcatcccatggaccgcatggggcctctccaggtggagcagggagcatgcctcttaaattagtggggaaggttctgctcaaggtatgcatgagttcccctgggcgtggggtactcatactggggaggggcccttgtcccgctttgtgatgtttctgggactggggtgcagggggaacctaattttttgtgtgtacctactaccaaggatgtacaggtttaatgtactcaaaatatatcatacgtgctcaataaatgtaagccattcttattactgttattttgactaagggctgggagctgtgttgggtgttttgcgatcctcctgacacccctgtatggcagaggctatgaatccactttatagatgaggaagcagaggcttggcgttgctgaatgatttggtgaatgccactccatcccttcctgggactgctgctggggtctggtgttatcctgaactgctaacctttggcaaggggacagggtgatggtgtgtgaaccaagccttctaggcaatggtctgggcacactcaggagccacatcctagagctgctgtccccacatccccagtctgggccagatggatcccgtcaactagagctacagcaagagacagtgaagttagacgtcacgaagaacttttgattgcaagagtgtgcacgaccttggtcctagggaagaaagaggtggccgtttagttgtgactgaggctctttggctttttttagaagaaagtattggtgatctgggatggatgtgtctgtgcctgtgtgtcggggtgggtaagtgtgctgtcttgtctggctatgggaggagagacaaaatgagctttggaaaggtaagcaagtgagcagctaccagaacggcctgtgtactgtaaaagaggagagaaaacctaatttgtaaggctcctgtcacctgtctcaggttgggttggctccagggtcattgagccagtcccctgcccagccacgggactctccagcagtccaccccgggggaggaggacctgggcctgctgctgtgataatgtggctgtttgtcaagctgtgttgctgtctctggcccacggcccaggactcacaggcaggaatggctgttttcctcctgccgagttggtgtgtagtggagtttgtggatagtgtgctgtgtcgcactttgttttggaaaaatccaggctagtgggcaggaaggagaggggaaggggtgtggctgaagggggtgctatgtgggggttggccacagcccccagaggagatgtaggaatggggccgggcccctgacgtaggttggtcaccaatctctggctgcctgacaaggcccctggtgttcgcttacagaccctcctcccaactgtgcccctctggggatctgggctcaggaaatggcttttcttttggtcctgagctgttgtgtttggtctgtggacctcaaaggaaagcagggctcttcccacagaggcattgcttcaaaccaaccccacccaaggctggaggttcgtgctccttgcctcatgacggggaagaaggcagcagataacagaacctggggtcatagaccttgagccacccagtagtgtctgagtggtgatccactcttgcctgcaatgaggaccaaggcaaaaagagttggctgaatctgcagcaggaaggatgagggttagataccaggaggaaattcctgacagtgagaaaagtaagacactctgtctgggaggctgtcgaatttcctttcatggtgccctttcagcaaaggaaggattgtgttttggaggtaaggatggggagagttctgtttggtgtttagagagttggatgaaaagttctgtaatcaacctgtgtcttgagaggagccaggaagaagttcaaagccatttgggtaaggtgatttgtgatccccggagaggaaaagaataggattacaggcaggcagagagcttattttcctttttataaggtttgtaaagtcctgtagtcgttttccctaggggctccacgcggagtaggcagaagattatgtgagcactgtgcagtgcccattttacagatggacaaatgagacggaacctctactcctcacactgggtatggtgatgagtatcatggtctgtaaaatataagctctctgaggtcagggacttcacttcctttgtcccctggtgtctagaacatggctgggcacacagctggtggcactcggtggatgtttgctgaatgagagaatgagcatgaagattggaggcccagggatgaccggatgccttgtgttactcccactgtgcttgtaaaaagcctacgtgatgaggcatgcttccaaaggcaccatctctagcctcgtgtgaggtcacctgtgtttctggagcagtagggtgtgtttgctgacatgccgtgcccctgccccagcccatttgttgttctctgagttctgtctgtctgtgtgtaccgacactcagacgtgtcaccgtgcatgtctgctgtccgccagcaagggtcacgtgcccccaaactttgcagaaaacaggaagccccgtcagtgagagggcagcccagtgattcatcaggggatgacagtcccagctgttcgtcccccatcctctgcactggggtcactgtccagggtggcttcctccccatgcctcccctcccctccccgcccggtggagcagagcgggcttggactttgccttatcacctctggaggcggcctggccagactctgtttgggccaagtttttatttatcttcactggctttttttggggtggggaggctgaggaatgtggagtgttgtaatgtttggaagagggcggtggggaaaggggagccaggtctcctgtcctgcttgtcctgcttacccctgcacctttgcaggctcccggccccccttggttccccagttccccctgccaagcccatatcaatatggcccattgtctttctccagctccctgggtctggtcccatgctcctggccacacctcacgtcttggctaccgttgtggcttccagttgttcaaagcagctgtggtggcttcctccaaaagtggctacggatcagcaacagatgaaactcaaggggctatttatagcagggtggccctggggcctggagcagggcctagggcctggggagattcagggactcctcattagggaccagtgaaatggagatgggtgaactgttgggtttctgtgttcctctgagggggcagttttggaacagcctggtttgggtcttgaaaaccaaacacagtcactcgttgactcccagctccacccctgtctaatccccccacccccaagcttgactcatgcaaactggagtcctcagggccagaagagctgtgagacttagaaacttccccccagtagccccacttggctcttccctccttcactgctgaggagctgctcattggtccgaggcagctgggactctgggcagagccttcttccggacagctggatggagggtccccctcttagcagagctgctctaacttggggctcagctgggagctggacctcggaacccacctatcctgcctcgtaggcactgcggagccaggagaggggtgcaggggctcctcttcttggagaccccgtggtcaagccccaggttggagtgtgaatcctgcctggccgtcaacttcccagggacttgagggtaagttattctgtgcctcagtttcttcctttcttggcagattgtggtcctgtctctttaaagaagaggctgcaacttggcggtaggaaaagaccattttctgagaggcacatgggtgtttggaaggtgtcaatgggctcaggaggtctgagaatctagaaactggccttcccaattctgcatcctgtgaggtgactggaaggatgggtagaggcgatgcagggtgttggttttctatagaggtgaatgtttggttgtaactacccttttcatttttcttgatacaaaagtaacaacaaaaacaacagctgtcatctggtaaataccaggcatgatgcgaagtgccttatatgcataactcctttggatcctcactgccagcctgaaggttgtcccattttacatgtgacattacaagaggctcagaggggttaagtaactggcagggctgcccagcaggatcctggaatccaaactctgtggtctgtgggcctctgaccctgtgctttcacacccgccatgccatcctgctgccctgggatggattgggcccatttgcttaagtttgtaccactcgacagctgtgaaaaggggagtgggtgagatggttactgtctgccacagacagtggggagtgggccctcaggagcatggctcactgtcttaggcctcgtcttggttcctgcatgctccacctgcctgttctggtctctaaactcaattgaatgacttgatgttacagctttcaagcagagaagtgtggggtgatggtggcaagacagaggggcgccattactctcatcgctccttttgtggtggcagtcgtattctcctcctggggtttctcttgtgttggcgagtgtatcaaagtgaagtgtgtttccattgattcagtaactgttgagtgtgccctcagtgtggatggcaccagcccagtggggtgcactcctcagcattcgggattcttccttttgtccctctggggcttgcacacaggcaggcacactcacgtggaatcagtgttgatggctttggcttcgggcaggctgtgtttttgcaggggttagggtggcagggccagaatgttggcaaggaaagaagaggatcatgtttgcccccgtggacagctctctggtgtgctcctcctgccatcctgcccacccctgcataatgctgcttctcttctctccttcccagggctccaccagggtcaccccgagtgtccagccccacctccagcccatcaggtatgcctggcccgtgggggcagggggcgggagtgcaagcaggggggtcactgtgggtgtccctgttaagtcttgcctctgggtcccccggactgcagccataaagccacgggtggggagtgtgggcaaacgtgaaaggcacaggagaggatgcgtgcggatgccgttggcaacagttgtgttttgagctcttagccagcccttgagctgagtctttatttacctgcatgagctcatctagtccttgcaacaaccccgcaaggtacgtattttattccctttggtagagcagcatttcagagagatgaggtgacttgtaaaggtcacacagccaccaagaggcagcacttggatttgcgtttagggctgatgagcattgaggcctgtgctggatctcttcctctctgcagacaggattctgactgggcagagtcatttatgaaagggaagttccctatctggctgggctggcaggggccgggggaaggggatgcacaagggactttgtgtcctggcgatccagagagtttgttttgccctctctgcctcaccttcacccactgaggctcctgagatgattggggatgccagccctgcagtagagttgaagcccctggaagtttctggcccagctgccagctgtccacagactggaggtggctccttagaggatcccctccttcccttagacctgggcaggtggatgcagagtgtgatgctgaggctgtccggctggtggcactgttctgcatttgcgtccttcctgggatccagcctgtagacaggggcgggtcagtgccccagatgggccacgtctgactcatggccctcaccagcacggcccctcttgctccccttcctgtgctgagggagaggctgaaatcacaggagcttgtcttgcgagtttttctgacattctagtttcttccttggagccagaacagagaggggttttggaggatggggaggaggggatgctgcaagttagctgaggctccccgccctcacacccacttgcttgcaggtatgtgtgcgtgtggcttcttgtcccagactggtcaccacctacaagaactgtccttgggtaggcagttggcttgagatagaaacttctcccccacagctgcaatgagaagctttccatagggacaagaagtagctgggactcagagtcaaactcaaaccgggctccttacctctgggtgctggtccccagtcccactcaggcccctgtcatcccaacagagaggtcctgccatgcctcatccttggctgccccatctccacaccccacctggactgggattgaaccctggtggaggtctggattcctcatggcttctcagcatctgggggcttgttctgtctagtgccagagagccctcatcacttttaaataccccagtggtattcctttcgctgccctccactctccactttatcccgctgtggtgaaaggttagcagaatgaaatgtcagtgctgcctgcatttgatagagggggaagcgagacactaggaggtcaatgattggggaaaaagctggagggatgggggaggtgcttctagaagcaagaggtgggcttcccaagtgggcatcctggacccttcctctggaagaaaagttgggagagatgtaaagatgcgagcccctcccttcctcacccagtgcccagtggagaggatggccagcccaggggcctccccacctctccgggaaacgcatggtgctggcggctgcccgccactgcagcaacaagggctctgtgccctcttgttttctgggcccttagaaatcagggaggctgctgccaagaagcagctctggcaggcagtgggagctgccagaggtggggagaaggccaaggaacaaagggcaggagttggcctgcctccgggagggctggaatgtgtgctgtggtctggcttacctggaacccaggtgaacgtgtcacctgagatgccccctcccctgagaggtttcccgcccactccacagctcgagagctaggggcgggcagtgggaagtctccgttccagggctggagagcgcccagcgcaggctctccttcctcttccagagcagtctggggcctttcgggagacttctgcctggccaggcagccagtgttgggagccagagctcctgggttcctgggccagtctggccctggctctgagctctggagtcacaggttgaaggcagtggccaaaggactgatgggaaccaagaattggtgtcatcacagtttggttctgaaatggcctgaggtccttgccagccctacccagcttgttctcgccggcactcccaagccggccacattggccttgccagaggaagcctgtggccttggccttgggttgaagagcagccaagcaccctgggctgcatatgggggtcacacagggtgtgtatggggtgcagctatctggggccttccctgtgggctggattctgatatggaccctccgctgcctgctgtctccctagaaacatgagtgtgagccggaccatggaggacagctgtgagctggacctggtgtacgtcacagagaggatcatcgctgtctccttccccagcacagccaatgaggagaacttccggagcaacctccgtgaggtggcgcagatgctcaagtccaaacatggaggcaactacctggtgaggatggatcctcgtgcccactgtcctgtgccctctatgcttccatctgctcaccacctctacatgactggtatccctgccaccagcccctgtgccagcatgccctcttctctttgtttatctgcctttcccctcaggcagctctcgtgcctgagtcttcaatcactctccagcccagctctcctctaaggagtgtgctgcagctggaatgtagcatctggaactctgtgtgtgcatgtgtgtgctggccaggagaagagagtaccaataagagttcaggttattgagcgcttgctactagccaggccctgttccaactgctttccacgcacttaacctttgcagcagccctagcaagcaggcacttgccagagcacagagaggtggggttatttgcctaaggttgcagggtcaggaagtggcagagctggcacagggtcggtgcctctgagaagtctgagggcagagtcttggcaacatgtgtcttaagggaccctgggttgctggcacctggctcggcctggcccagaggagtcaccttggcacacgggagagaggtgctggcggtggtctccactaacgcagaaaggctgatccgtccttggccccagaggagggctcaggtccattttagagggaggtgcctgtggactggacccacagatctgatctgtacaacctcaggtggctgtccccagggtgtttgaggtgggatgtaggaggctgcattagtttcccagggccactgtagcaaatgaggtggccctttctatccatgggtttcacctctttggactcaatccatcatgagttgaaaatattcagaaaaaacccaacagtaaataacaataaaaaacaatacaaataaaaacaatacagcagaacaactatttgcagagcgtttatattgtattaggtattacaagtaacctagagatgatttaaagtctacggaagtatatgcataagttatatgcaaatagtacattttttatatgcaagttatatgtaaatagtacatattttatgtaagagacctgagcacccatggattttggtatccactatccatggcggggtggaggggtcctagatccaaatcctccatagacaccaagtgatgactctacctcaaatctggtggctcaaaataacagaaatttattctctcacagttctgaaggctggaaatctgaaatcaaggtgttgacggggccatgctccctctgaatcctatggcagagaatcccttcttgccttttcctagcttgcggtgggattccttggtttgtagcgcatcactccaatctctacctccatctccacgtggccttcttcagtgtctctctgtgtgtcttctcttcctacaaggacatcaattattggacttagggtccaccctagatccaggttgatgtcatattgagatccttaactacttacactggcaaaggcactatttccaaataaggttgtattctgaagttctgggtggacatgacgttttgaggatactattcaaccactatagagacccacctgttagctgcattggggcattgttaagagcttggctttaaacctcagaaagtcctgggttcaaattctggctctgcctttactaactacatgatcttagctgtttagcctcactaagccctagcttctgtgtccgtaaagtgggtctgaggtctacctcttattgttgttgagagaattaagccagctgttagatgtaaagtccttaagacaggctgacaggtggcagacattcattgagtgatggctattgtaccataataaagtgtattcctttacagagtgcaagagtggatgcaaatccacctatttctgattttaggagtccagggttctatgggacttggtgccctgccacccctctctctatcctgcctattccagactgggctgtccccttttctccccaggagatgacacagtgcctttgagtttcctaggcagtggggtggaggtgggaagttctgcatgcccccctcggaggtagaggcaggaattccagagactggagaattccttaggattccagtggtcaggaatgggaccccagtggtcaggcgttgaaaggcatgtgctgggagaggtatgtcaagggtctgattgggcccacccaggatggtttgcccctctgatggaggaagtctggtgacagagaggttgcaacctcatgggatgaggttctagggtcaaggtatgaagtggaaaccagagattgccaactacttatcatctcacacagctggattcccgttcggtgtggtgagaggcaagcggaactggagacaagttccatccccttctcgtcttccattcgggacatccgctcacggaacagggtggctgagtgtctacatctctctctctctcccttttcatcctgaggacctacagttgagttcctcttcgtgacggtgtgtctgctgggactcacctgcatgttcacgtatggatagaattcctatcggggagagagagcgagagcaggcacaggaggtccagggagctcatggctgttccgtggccaggcccctggccgtgagaggacattgacgctctgctggatgctgtcgtgggctcttcagaggaagttggcaatgatgccacggtcctttctgggaccagcaggccatggttctctctctcctcgccgccctcctcaccctcacctcctcatgctctcttccttttgctccttctagctgttcaacctctctgagcggagacctgacatcacgaagctccatgccaaggtgagccaggggctgttttggggtaggggaggagaaggagaacagatggactccctctctggagttcccacataataatcttggggaaaatgctgtgacagtttgtcagagtgccgacttatatctggaaaatggaaaatgatctacttatcatttccacaatgccaattacagaaagcaaagcttggggcagtgactttccacccaggtctgcctgctggggagtacacagaatcacttgggtgaggctggagttgtgagatgtttagtttttggatttaaagcagttgggagccgctgctttcgaccttccagctgccggtttttttgtttgtttgtttgtttttttgagatgcagtccccctctgtcgcccaggctggagtgcagtggcgtgatctcagctcactacaacctccacttcctgggttcaagtgattctcctgcctcagccttccgagtagctgggactacaggcacgtgctaccatgcctggctaatttttgtatttttagtagagatggggtttcgccgtgttggccagcctggtttcaaactcctggcctcaagtgatctgcccaccttggcctcccaaagtgctgggattacaggcatgggccagcgcgtctggacctgttgctgctttttattctgtttgctcgggggctgtgtgtgggctttgccatgggcatctgctcctagctctgagagtttggtacatgctgttgtgtgatcctgggtgggtgatggacttctctgggcctcagtgtgcccctctgaaagtggcctggctggattaggtgtgctctatgggtccttgcagagttctcttttactttaaagttggtgagtctagaaagattttgagaggcccgaagcctgctgttcaggtctgccctttgtgtccttaaggctgctcttggctggcctggaaagtggatggtttgtgtgaccagggcctagaaaagagtcatgaacatcaggcagccttttgctttttcctctcgcagcctgagccaggcctcagggctgtccgtaggagaagagcttgaggacagtgcttggggcccctcagcatgttggaggtcagtcctatggtagggaccttggggtcatcagctccaagcctttctttttgtttgtttttttaacacacatatggggaaattgaggctggaagaggacctgaggcctaaggccccacagtgagtcagtgccagggccaagacccgggaccagggtccccagtactgggtcatgcatggcctttgcccttcactcccctgcctcctcgctggccagtgggcagggaggaaccaagtcctggcaggaaccagcagctgcgggccactgcccaggtactggcacgtggcgtaggtggctcccgctggcttgtttggctctgcagggcttctgccctcttctcactcatggcttgggccacaggtactggaatttggctggcccgacctccacaccccagccctggagaagatctgcagcatctgtaaggccatggacacatggctcaatgcagaccctcacaatgtcgttgttctacacaacaaggtcagagctgtgtgtgtgtgtgtgtgtgtgtgtgtgtgcgcgcgcgcacatgcgcacatgtgtgtgtgcctgaatgtgtccttggatgattgtgtgtacctgcctatatctttggattttgcgagcatataagtctgtgtgtatttttctttctaggggataataggttctgtcttgggcggcacttctaagaagtgtaggggacatcagcttatgtccacggcagtggatgatcagctgtgttttttctgagacttagtccccacctgcctccctcccctgaggcccccttcctccttatgttctcccttaaatccacacccctctctccagccctgactcttttccaccaaggcttctagataagctctggggcagcaaggctggccttagaaataaatgattttgtgtttggggctctttcagggaaaccgaggcaggataggagttgtcatcgcggcttacatgcactacagcaacatttctgccaggtaagaggggcctggagcctcccatcctctgaacatcgacagtgtgacccccctcctctcatccacccacagcctctctgctccctggagtgaggggatacgcacagagggaatgagaagcgatgaggacgggggaaggggcccctggctctgaggcaggagcctgtggacagagggcgggagggaggagagtccacttctctatcaggggttctggtggggcagccttgggaggcaggccctgtcctgagcaacccatgcggccagctcctcggagccacttttccttgccaaactgccttctttttccctgggccagcaggaagggagtcagaaagaaatgtcggatcagatctgggtctggcaaaacagtctagaagttgtctcatctattcctctgcctctggacaacagggccctcttcctacctaggtgtttggaacaagaataaagaacatccagtcactgactccctttccaatcccactctgcagagaggcagagggattcacccattcgttttgttattcactcaacaaggaatatggctgggcgcagtggctcacgcctgtaatcccagcactttgggaggtcaaggcaggtggatcacttgaggtcagaagttcgagaccagcctggccaacatggtgaaactccgtctctactaaaaatacaaaaattagccaggcatggtggggcaggtgcctgtaatcccagctactcaggaggctgaggcaggagaatcccttgaatctgggaggcagggaggttgcagtaagccaagatggtgccactgcactccagcctgggagacagggagactctgtctcaaaaagaaaaaaacaataaatattgaacagacaatgtgccaggctctgttctaggtcctgggaatgcagcagagggcaaagccaggccactgccctcatgggcattaaacacataaacaaatacattagtaatagcaggtgataattatcgtgaaagagtaaagggactcaagaagggcagtggcgaggcaggtccatggttggagaaggcctcttgatgaggtgacactggaacagagacctgagtgaccaggatggaaagggctgagccttatcaagcctgtgggatgtgccctgcacactgagagaagaggaaggatgggaatgcgaggggctgaggtgtttgaagctgagcaagtgagggaagaggaagaggaggggaagctgggaggtggcagagccatggggcctcgcggcctcactgaggactttggggtttgctctaagagtgatgggaagtcactggagcttcgtgatcttttcatttcaaagtgacttctctgagtgctctgtgaggatggtagaatcttctgtggagggcctgccaggaggctgtagttttaggacttcgagcaacccaagtcagtctcacctttgcttaatgataagcaaagatgaggctgcacctttactgcactcctgtacccctactgtgtgccatgagtgccaagctctttatggatattccctcacttcatctccatagtcacctttgaggaaggggcaattatcaccctcatttgatgggtgaggagaatgaagttcagagagattcaggaacttgtaccaggacacggggctcataagtggtagacctgagctgggctcccaggctgctgaactttaaagcctgggctgagtgcggccctgcacagttggagagatgctgaaacactcttttcctgaaagcttctcggcacaggatggcagggggaagaggcttgtcttccctccaggacaaaggtgctctttggccagagtgctctgcaggtctgagggagcaggggtggggaaaacaagcggctcttggatgcaggagttgcctcttttgaccacctgtctctccctgcagtgcggaccaggctctggaccggtttgcaatgaagcggttctatgaggataagattgtgcccattggccagccatcccaaagaaggtgggtctctggggctcacagccccttgcatgtatgtgtgcactcactctatgtggggactagacttgtgtactcacagggatgggatagctgtgcctaggtgggggtgtaccaggcgcaagttttcagatgccagcctgcagtggtgtgagctcaggcacacaggagagcccgggagccagcctgtggtgtgtgcccgcagattggcacagcacttgactctgaggcctgtgctagagagcagtgcaaccttcatggggaagcatgagtctggggataagaaggcgctggtctaggaaggcatgtgctgttcttggccctggaagcaggattgcttcagtgcttggatgagtctacgggagactgcatcactgccccctgctgtgggaggtcagacactcatgataagggtcaccttctgttgggagagtttagacagttttactgagagctttcaaccacatggtctcattggagtctcacaatagcccaggcaggaaacagggcagggatggatttattcattcagcaaaatttaaatcatctactatggctccaagcactgagatatctgggtgaacaggaaaaagtcctttcccttggtgagctgatacctaatgagagagatggacatgaaacaaataaccatacaaacaagacagtgtcagacagcaatgaggctaggaaggaaagagggcactgcagacacgagaactgataggggaacggggctcttttaatagggatggtcagggaatacctcttagagggggtgaatttgagcctaaactggaatcacggtgagctatcgtgtgatgatctaggcatcccattttgcagattagaagctgagccgagggagggggcgtggccatggtctatagtgagtagtggcagaactggaaagtacgtgaaggcctagtaatgcctgggctagggcagtgcctcctggttgtgtgacccactgtcctgagggatcctgctccgtgggtgacatgttgctcaaagacatctcatgcacaggaaggcacaggcagcatcaggggcaggaggtctttgggggaggctgcagccaggatggtgggaaacccaagcccaaactggagacctggatggtgggacgcaggcccagctctgtttgctgctgggagttgtgggcctgccacctgccgtgatgtcagcaccattctgcacactggtgacatggtgctgaatccgccaggcaagggcttatggagctcagcttctagtggatgttacacatataaggaaacaattcagatagtcatgagagctgcaaagaaaaggcaaactatgatggctagagagtgatggggctggaaagagggctgattcaaatggaagggccttctgagaaggtgacgtgtaacatgagatctgggtggggagaaggaagcctccaagtgaacgcacgggataaaggatccagaatgagggaatagcactgactacaagggcctggaggccaaagcatcctatttgcctttttagcccctgagcacactgactgggccaacaagggcctggagctgtgagtcctggagctctccagcctcatcatgctgagggtcccaacacgtgccccatcatcccaccttgcttggctggctagaactgtgctgtcccagctgggggctattcccgccattgtaattggaagcccaagaagtgagtgagtcctcaggtaacccagcaccttatagttgcacaaaacagttgatagccagcctcagagtcagcaaccagaaatgggatgtctttatgtgcagaaaattctggttagggccctggagacagcagctgtggatcaacgagagtcttctcagggaagaaagaatgattggtcaagcactgccttgtcagcctctggcttgccatgtgtgtctgctgactgtaatcacggtgtggcctttgaccttgaaggataaggatactaagagagaagcatgctgttccaatggcacagtgtggcttggagagaatgggtagagagtaacatctctgagtctgagtagtgaaggcctgaagaccagggatcagtgtcacctctcaggaataggattatttagggattccctggtgtattagtccattttcatgctgctgataaagacatacccaagactgggcaatttacaaaagaaagaggtttaatggactcacagttccacgtggctggggaggtctcacaatcatggcggaaggtgaaaggcaaatctcacatggtgacagacaagagaagagagagggtcaagggaaaggggtttccccttacaaaaccatcggatcttgtgagaattattcactaccacgagaatagaatgggggaaaccactcccatgattcaattatctctcactgggtccctcccacaacacgagggaattatgggagctacaactcaagatgagatttgggtgaggatgcagccaaaccatatcatctcgtgttcaacatatgcttgcatagcaggcagttggggcgtgtctgcctggctcctgtctgacactgcctctgcttgtggatgggtcacctctctgagcccagatgtggaagtgcaactgtgggtttactatgcatttattgccaccctcctgccttcttgtcagtgtcacttgcagggaatggagcagatggaggagaggagggcagggaaagagagagggaggggctttgcctgtagctctctcattcattgtcacccgcctccggactcattgtccctcgaacacagacacatcctgttggcacgatccagagatctgataggaaccgctattccaggtttccggcttgagtaatggggcaggggcctgaataggatcgggtgctgcccatcagattatcttacttgagtagtccgaggaggccccacccaaacccagggacagaggcccacaggcttggaggtgggccaaggagccaagagacaggaggggatcttatcatggtcatgtgggctctagttccaccctcttcagagagctactattggctcctgcagagcctcagaatacattctgattggtctagctgactcagcttgtcattccatggccaatcagaaaagggaaaatgccgaccaatcgacgcagaaggactgatctctattgggcagatgaccgatctctagtttattgggcagatgcgttggagcccagacttctttcctgctctccccatccacttccagctttgtgtgttcttgctgtgtgtctctggagtccagtgacccctcctggaccttatttatcctctctgtctagaaggagagggtgtgggttagttcttccattcttccaacagatctttgttaaagaactaggggatgttggctgggtgcggtggctcacacctgtaatcccagcactttgggaggccgaggcgggctgatcacctgaggttgggagtttgagaccagcctgaccaacatggagaaaccctgtctctactaaaaatacaaaattagccgggcatggtggcgcatgcctgtaatcccagctactcaggaggctgaggcaggagaatcacttgaacccgggaggcagaggttgcggtgagccgagattgcgccattgcactccagcctgggcaacaagagtgaaactccatctcaaaaacaaaaacaaaacaaaaaaattgggggaagttgaccctagagatagatacttattagaagctagttacctcgaataccaagtaaactcaaggatacagagagagggacttaatgcactttggtatgatgtagagaaagtgaagaactacattcattaaagtcttgctcactatttgctagactatcacttgtggctactggatctgtgggcagaactggggctgtgagtatgagcgcaagcttgatttgagctttgtgtgggggtgtgagggcgtcagagctgtttggtggttgggcctgccttgtgcagctaaatgatgcctgtcagggatgtggggtggaaattttggtccagcaggagattctcgggctgggagtgaagcaggaaagagatattcatgttgaccaccagagggcggtggcgaactccaagtgggatgcttgacttgacccagctctaggtctggtatacctgctcactcttcctacctagggctcccagcagcaggcaagcatgtctgggagggaggcctggttggggagggggaccatgttggttggggagagggtagagtaggtgagtggtctagggcaatgttcttggaaaagagagaacagggattactgcaccagtacccacctcactccctgaagctgcttctcccaccactacaggtacgtgcattacttcagtggcctgctctccggctccatcaaaatgaacaacaagcccttgtttctgcaccacgtgatcatgcacggcatccccaactttgagtctaaaggaggtacctgccttgagccctctgacctccacccttgccaactcctccctttcatcttccatcttctctaagaggcaaccttgggtagtaacagacagcccgagagctgcagagtcataaggcctccattggactctcaagtgtattgcttcctaaacttttctaagcaccaatctatttgcagtgcctgctggccaatgatgttggatgggcaatgtttttattaatttaatttgccttacaagtgaaaagttggtatttcttcccctttctgcttcctcttttactctttcctcttttcctccttccccttcctaccccgtcttcccccatttcttccttcctttctctctttctcccttcactgtctcctctgcccctcctgcctgccagtttctgctgtcttagctaacacccaccccacttttacaggatgtcggccatttctccgcatctaccaggccatgcaacctgtgtacacatctggcatctagtaagtattacatgggcgtgagaggccagagaagcccaaggcccagggctaaggaccaggtcagaaggttggggagaggagagaatattctcaagagggctgaaaggacagagtcagagaggtttcccactaaccctgtggcgtaggggcagcagggagaaaatgcccctccctcatctcccctccagcagcccactctttttctgcccacctctctcccttagcaacatcccaggagacagccagactagcgtctgcatcaccatcgagccaggactgctcttgaagggagacatcttggtgagtgctgtcctctgtgtcaagccccatccttgtttattttctctcccttcttttcttactcctttcctgcctcttgggacaagacaggtactcctcctgggctgccaggcttggaaccataggctctcagggctcttggaagaccttccagtctcacacagtctgtgtctctcaccctgggcttagctgttgttctggagcatctccagggaaatatcactcagcgtgagctgttacctcctggcttcttattggtgacaaggactctctgaattctagcttcagttcttcctgctgccatttaaatccatcttactttttgcactctgacttgtatgtagaaacttcttgggaggacatttttgtccccagaggccaagactggcctccaattctctgctgttctagaagtttccccacagaactctgagatcctgtttggtgttgatgagctctccctcaccgggtttggggtgagccttgggggctcagtcagcggagctgataaggaggctccctgggacctgacctcccagcctcaggcccctgactggttctgcccgtcttcccacccagctgaagtgctaccacaagaagttccgaagcccagcccgagacgtcatcttccgtgtgcagttccacacctgtgccatccatgacctgggggttgtctttgggaaggaggaccttgatgatgctttcaaaggtgcgctccttgagtggagctgggggtgggcacccctgtggcagggagaggagctcagtttgagacgatatggtgggtatggggaccatcttttctggaccatgtggtctgtctagtctcagggtgatggtaggagagagttgagagagacttgggagagagttgagattggatggtctgggaattccagttgttagtagaagtggagataaactcctcccagtccttgggctgttttatatcttgcagccttctatgactttccctgtctctccttcatcttgtcctcccagtttgtcacatgtgtcctactgacaatcattttttttttcaacattcactgggcatctgctttgggctaggatctgtaccaagtgccggggatacaaagtaaaacatggcatggtctctgccttggtggagctcaaaaatcttgttgagttgggaggcagactagcaggggataattaccctgcagggcagaagagcagtagtggaggggtgtggcagcagcaagggggaaccattttctgagaggagaagaggtggttgggaaaggtttggtgtttgcttttgcttctttcttttatccattggaagttttatctatatcacattaatgcctgggacatataaatacacatttatttacccatctctctctccatccaccaatccatccttacacacatccatccatccatccatccattcatccatccgtctgtccatccatctgtccatccatccacccacccatccatctatgcacccacccattcatccatccattaatccatcccttcattaatctgtccatccatccacatattcattcatctgcccacccatccatctatccatccatccatccatccatccatccacccacccacccacccacccaccaagcatcacttgtgtgtctgtatgtgtcgggcatgtgctagaccctatagatatgaacagaaagaagtcaggccctaccctcagggagttcacagtttcctcagtgagagacacacaaacatgatactatgaagtgttgcctgaagtgatggagacacgcacaagcatgataggtgtcccatggagcagatgccatccttgctgtaacttcttttcctacatgcagtgggcagtgatctgtgtccagagtgggctcaggcggagaaagactggacctggggcttggaggagggtccagatctccttagtgtggtctggctcatgtagaagggtgtttctttaatgagctctccttgcactggagccagaagatgccatcataattacagtacagaatgtaaatgataacagtcttaacaaggaaaaataaaggcatagctgatcaaataaataagggattgggcagaagttgagagaaggaagggtcacagatttcctcctcttacgtagtgggagtcaggagataccatcgaaaattgacatatcaataaatagaggcatggccaggcacggtggctcatgcctgtaatcccagcactttgggaggccaaggcgggaggattgcttgaggccaggagtttaagactagcctggtaaatatagtgagaccccatctctacaaaaaataaaaaaattagccgggcatggtggcatgtgcctgttagcacagctattccaggggctgaggcaggaggatcacttgagcccaggagttcaaggctgcagtgagctatgattgcaccgctgcactttggcctgggcaacagagtgagacctggtctctaaaaagagaaaaagaaatagaggcttaactatcttatttaaagtttcaaagataatcaatagcataaataaaaacaataatctaatcagatttaagaagacaggaagtaggggtagtagtataagtgaaccaaattattcatattaatagtggtcaatccatagaggttatttaaaattcatgtctggctgggtatggtggctcacgcctgtagacccagcactttgggatgctgaggccggtggattgcttgagcccaggagtttgagaccagcctcagcaacacagcaaaactccgtcgctataaaaaatacaaaaatgagccgggcgtggtggcttgcacctgtagtcccagttactctggaggcagaggtaggaggaccactttggcttgggagattgaggttgcagtgagctgtgatcgcaccactgtactccatctagggtgacagagcaagattctgtctcaaaaatataaatatgcactccaggctgggcgacagagcgagactccatctcaaaataaataaaataaaataaaataaaattgggatctagaaatagtggcataaaaatagtggctattatttagagtcttagaggtaaattgctagtagaaaagcaatagaaatagttagaatcagtgacctcattacctcaggcaagtaggacaggggctagagtgggcaggaaatttaatttcattgtatagatataatttcatgtatatatgtataaatatacattgattattattatattattaaccatgtacatatatggtattttaattttttctagaagaaaactttttatggaatcctttttgggactttttgcctatttttatttttccttctctttttccagatgatcgatttccagagtatggcaaagtggagtttgtattttcttatgggccagagaaaattcaaggtataagccgagttagaattcattctctcactccttccttttatcctgaccctatccccagcacccttccacccctggtctgttccacagtgatcaagttatttttgagaggcaggccatcagtaaaggatctgggtttcagagtggacccctagctaaacatgaaccagtgacttaatctctggataataaaaataaaaaagcagacagagaggcactgggttggataaactgttctggtcccattaggtcatcagcctgttatattcagagactgaggtccttggtagatggagggagtggctggcgggcagggggcacacaaaggtgctggatagaagatgtgtatttatgagaactgaggtgattcaacctgaaggctggtttaataataaccttgaagcctctatactggttataagtggagaccagttgttcaccatcttattcgagaatggaatgaaaggagatgaagttaggttatgggcagagggactctggatagactaaagaaaggactgccaagccaggaaggtaactcaccctgacagacttgactaggagctatgctgtctttgagccaggtttttaaaaatttacttatttatttttattttaccttaagttctgggatacacgtgctgaatgtgcagatttgttacataggcatatatgtgccatggtggtttgctgcacctgtcaacccatcgtctacttttaagctctgcatgcattaggtatttgtcccaatgctgagctgggttttctgtggatggctgggagattctgccgtgccccctaggtttctgtctggagcggagagcgttttaagagggggcagggccatgcctgggatgaccctttggaggctttatgtcctttcaatgtcggggctgtgatttccctgctgtccctgatcccacgtagctcataagcagcctgccccccacccccagggtctgaccccaggggcagactttctagtctcttggcactgcctcaggagccccagggacacagaagaaaaagaggcaggtacccagccaggggtcctccccgctttcttccagggggtcttcattcttcagtgcctgtcctgatttacccctatgacccggcatgagccttttcaagaatgtgagaaactagactcccagttctcagtccagcttaagccactggtcccgcccaccacgctcaagaaaatgagaagtccctcagggagcctcttttggggagcttgtgggctttctctgtttttccagctgctgatctcttttccctctctgcactgtctccccgactgccgctgcctttcccatcccacttaggcatggagcacctggagaacgggccgagcgtgtctgtggactataacacctccgaccccctcatccgctgggactcctacgacaacttcagtgggcatcgagatgacggcatggagggtaggtgggacctagtggctcccagcccctatccaaactgcacagcctctgctcacatgaccttgcttctcttggcctgctttcaagagatctgggttcgagaggaggcagaggggaagtgtgaggtacctccgagagctcaccgttaactgggggaagataaggcacatatatgaatgtattaaataaaagtgaggacagagccaaagaaggcagcaaaatggccacaagggggttatcgtggaagtgtgttgctacagccaagtaagttccgtggacagtgagttctctgggattggcagggagggattttgagagctggagtgatctgggaaggctccttggaggatgtggccttgagtggagcttgagataccccccactgtgctgcaaaaacagcatttgtcacatgtgtattaaacccactgttgggtttcttcaggcttgctgcctgagttctctggggtcagagtactaggaacagaggcacaggatctagggcctacaagctttcatcaacagccaacaaaaatgtttgagagctgggaacaaactgataggctctgaaatttgaaaagaaagcagcagaattgaaattaatacatgtttaatttagctacaaacctaacattatgtcaaatggtccactgcaactcaggtcgtctcttgagagttctacatgcattctatttatttatgtggtctatctgcatatgtgtaaggagacgtggggcgggctccgaaagtgagcatgcccagagcccaggaactcttgagatgccctgcctggggtttggccacaagcttcttttcttgagttggtcgtaggactgcagaatgttggagctgggaggaccttcaggatggtccagcccatcacccatctgtgttcagttggggtgactgagacccttcccagaggcagaacctcctgatttacccccgtgacccaggatggccctttcaaggatgccagcacccagcgtctggcttctcctcccagctgaagccagtcctgggtggggctgtgccatcctggggcccctgggtcccatggcagagctaggttagagataggtaggcctgggggcctccctgtgccctctttcctctacacggcgctgtcttctgtctccctccccaaggttttggatttgatgactcctctctgaaaatctttgggcctttccttgaataaagatttctcctctgaccttggggtcaccagaatgagcacaaggtttcagagagaagtgggatgagggagggtggttggactagaatttggggactcactgagagcacatttttttacgtgcaacattgaaaagtggatggcctgtcctcacacctgcctcagttcccaaccccttttcctcccccaggggcccagcaccctcagattggccaagacaccccaccaggcccctccgaccccccaggctgcttgtgaaaagcactcctccatccccgggcgctgagcggccaagcagaaagcagaggctggagcgaatttgttctgaggtttcagtggctgccagcctaattggtcgttgtgctggggatgtttgcatttttaacaagaacatttggcaattggaaagaatttttactgtctctccatctcttcttggtgcatggtcaatgcgatgataaatgtaaaaacatttagtaaactataaagtgccaggcaaataaaaggtaaaataattaacggtgaggaggagatgtgggaaagacggggcttaggatgtatttggctgtgggggaaggaagaagagcagacggtcagagtgggaggcagcccagggacagcagagccgagagcggctccccctctcggcagagggccagcttctcagcctccagacagggcccctctgtccttgcaggatgagctgacctttaactgaccaaaaggtcctgctggttccatccctctgtctgagggaatggattagaagggaaaaaaggaagggcgagggggcagaagaagcggccagggccttccctcaccaaccctctgtcccctctacctgcctatagcggccttcatgagaggcagttagtatgtggttaagaatgcagcctctgcagccaaactacctggcttcaaatcctttgacaaggtactgtccttggggcctcggtttgacctgctgtaaaatgggaattcagtcaacaaatcattttgagccccttgtgggcagcacggcctgaggaaggactgcatgtggtgttttcttgggggtccgtgacacatttgtgtcagctgtggccagtgtgtcaggcgcctgcaagacatggctaagggagaaggcctggatttaccatgcaccagccatggcaccaagaacttggtagttgccatttcatttgatgctcccagccattctatgactcttattatgtccaaatggggaaactggagcacagaggggttaagtaacctgccccagcttgccaagccagtcaagagcagatctgggtttcaagccaccgcgttgccccctgtgctgtcctgggttggctgacgtccctaggggcctgctttgggcatctggttttgtggcagtacctgggtcccactaagcctagtacctctctggctgctacctctcacccatggacagagaaagtcaacccatcctgactgttaggaagagggagggttaggcgaggggggtgtgctggagcgtggcaccccggaggccactgggcttgccctgaggcaggcgttcagcaagacttcagtgcaggcaacagctgagcccctggcccgacccacagagaagagtgtgggccgctcactcaggaatgcttctgatgagtggcaggcctctcgaaataggtagagggaagggtgtccaaggtgacctggggccatttctgaaagtggccccctgcctacctcttctatttcaggcccactgcgggagggtgatagtagaggccagaccattccctctggagcccaccaggagacttggaggaggggggcagggagcacccagccaggcagtcagcagcagatgtcatctctggcctgcatcctctcgtgtggcctgtgtccccaccttgccctctcctggcagtgaggcatggccagcaccaggctcagagctcctggtcccccaggaggccctcctgctgcccctgacttaaccatcatctcaggaactgctctgcatttaaccctttcctcactgcctgcagccccccaacccagctccaagttcaagtttacagcttgcagcactgtgacacttagagccctctcccgaattctgttgaatttctgttctctgaaggctgacttctcaggctcaggtggctgggctagtcataaaacccgagagggagggggcctgccaaaggggcaggaaaccccgaagtatgggccctccttggcattagctcagctcagcctgtaccaaccccatttcctggatgaagaccccagaagtaggcagaggttagcaatcttgtccagggtcatgagacaagatgtggagttgatattggaatccaaatccctttctacctcccttggagctcagcttaacagcaccccggaacccatacccataatccttcaggtggctccttcaggatggtcgtcccatttctgaagccctaatgatgacaggggctcactaccacaaagggaagcccgtttatggtgggacgggtccagctgtgtctctgtgtagcaaagtgtggctgtggtggagactttgggctcacctgctcctgggccaggaggaggggggcgtgatgagggtgaagaatcaaagggaagctcaataataaggaccctcggactggacgaagttctctgttgtgggacagtggctgggaggacagtgcctgccatcttggggaccctttactcccagagcagtgccttctggtgaatcccatgcctgaagtattattaatctgctctggcagccacagcaaagcaccacagacccaggggcttgttcaacagaaatgaattttctcatagttctggaggctacaagtctgagatccagatttcagcagggttggtttctcctgagacctctctccttggcttggagatgctgttttctccctgtatcttcacatcatcttccccctgcttgtattcttaccctcatctcttcttataaagacaccagacgtattggagtagtgctcaccctaatgatctcttttcaccttaattgcctctttaaaggctgtatctccaaatacagtggcatactgagctgctgggggttagggttgcaaaacaggaatctgaatgggggaacagttcagctcgtcacacctgagaaggagttttctgggtcacatgtatttggatgccccaggcctttgatcctgagtgggaggaaggaaaggtcaaggacaggtggtggggagaggtctggttccctccttgcgggcacctctgcctctctccagttagatctggagcctgccggctcagtgctctggctaacaccagttttgcagcctccagaaaccccattagcaacttggcctgagttctgatgccccgtgcccagattccaggtccccatgggtaggggtggcgctgtgtttttgcctctgctgtataaagcaggctccaaattcctccatagtgttccggggcaagccttctcggaagcaagccttgaaccaagggatatggactgccctctgcctctgagaagcctgcaggctgaccaggcctgggttcctgcctgccttctcatccaccccccacctttctgtgacttccttggacatcagttgtttagagtttctcttgactcaacagagaggatgggaacaggggttgggcaagtgaggggtgctctcagaaagtagatttctcagggataaaggacagggtgactcaggggaatgacaaacctcccagcctggctgacaagggtgaggggctggtgtccaccccacttctgcatctctcctggttggcgcccatcagtctttcccttgtttccatggacaatcccaccagaaccgggggctggtgacagggggccttggttttgtgcccaagcttctcagccctcaggggagatcttctagttctaaagggtgcccatccactccccaagtgcttttgtctgggtaggggaggagcctctgcctggagccaggaatccctgttctgtgatgacttcttatgagctgggcttatccaaggactctgtgatactttttttttgaaagaggaaagagggagggaaagagatacagcaaacaggcagagaccaagaaggagaaagaaataaatagatgagagacatggagagatagacaggcatggatagatattggcctgggaggcagaagatttgggttctgggtgtctctggtaactctttttccataggtcctttttatttcttatgaaatgtgagggctggagtagatagtatttctttccatttctttgagctcaagcattgtgtcttttcatgacttgtgaagacctaaaaggggcctgccaggcttccctctcagactttcgcaacccatgggcttagagcaggaaggagcatggcttagtggttctatcagtcaggagaggctcaattatgccacagtgacaaatgatcccaccttctcagtgggcctgacccaacaaaagcatatttctgctcatactacatatccactgggggtcagaaaggtctctgttcatcacagatactctaggctgagggcagcttcatcttgtaggtgcttccttcactgctgcagctgtgggaagaagacaccatggcttgcacactgctcctgcctagaactcacatgttttccttccgctcatgtttaattggccaaaacaagccaaacacccatgcctagcttcaaagggggcaaggaagttgtgcatagaggatgagaagctggaaataaggttgaacagaccaatctctaggaattaaggctatgggacctagaaccagaagatctggttctaagctctattgtttataggtgtgtttcttggccaagtaactttgcctttctgagatccaaatgtcttaattgtaaaatgggttcaataacagtactttcattatagcattattgtctgatatacaatgaggtaatatacatgaaatgtgaaaagcagagtggcgcatgccatgctggcagtgatttgtgtctgttattattattattgaagtgctggaggagagaagatacagacatgattttagccctctcttctttagaaaaagccgcgttccccttgcccctctactctctgggaaccatctatagctggctctgttctgggaaccccactcttgggagtcaggagacatgcctctgacatcaacttgctatgtgaccttggaaaaattacttcccctctctggttctcagtttcattatcagcaaattgaggataatggatttcaaaaagggcttccagctccaaagccctaacaatgttgaggatgctgatgctgatgatgaccttgagatgagagcactgtgtactttctgggtgccaggcaccactgactgtatgttctcttggttaatcctccccaaacacctgtaggtgggtgctgttttgtacttactgggctgaacaagcagaatttgtaggatgtgattaaaaagctacttgttttgtatactactgccctttaagtctaccctgtttccccttcccccaaatgacactggggcaagttccatcccttttctagccactctcaggtaatacaaggtcttttggtgggtaataaataaatacgcccagtgctggtgaacttgctcctcccccttgtcagctcctacctggctgctagctgtgtgtgtgtgtgtgtgtgtgtgtgtgtgttggttggggggcgggggtggtggtggtggtggggaggctcagtaagtcttctttctgttttcctgacttacatatttagggttaggaagggaagaaagggggaacattccagaacattctttcttgcctggtggggttgcacaggcattctctgtgtggagacagagacacaaatgatatctcttgggttctttgccagtggaagattctggaggcattgaatgccctctggcttctctcctgaggcacttctgtaggtatttgggagaccctgtccaactgcccaaaagtctttcattcgctgttccctttgggtggcgaacatggttctgttcagatgctcaggacccccttcctcagcccagtcatccttcgctccctccagcctcctcctgctgaaatctctcacccctgcaggtggccctcatggacagcatttgaggcagcccaggggctggctctctctcaccttggtccaaagtaaaaagtcagcactcctggcccccgcaaagacccgggttgaggtggccagtgcgcccccacccctgttcccacagcacagttaggcccctgtctttcacatcctccatgcgcccgcaggtacctgctgagtctctgagcagactcactgagatgagggagaagcctctagaaaggtgggacctgccaccaaacaccgtgctctccacaattcctcttacaatcttccactttctaatctttttacacctttgatatgtatgtgtgtgcatggtgtgtatggcggtatagtttggagccacaaagcagttttcagccatcactctctttttaaaaacttaatagctgtatagatataatttaataccacaacttcacctctttaaagtatacaattcaatgggttttagtatatttaggcttgtacaaccatcaccgtaatctcattttagaacagttttatcacccccacccaaagaaatcttataactagcagcagccactcccacttctgccaccaactcccaaccctaatctactttctgtctctgtagatttgtctattctggacactttacgtaaatggagtgatacaatatgtggtcttttgtgtctggtttcttttacttgacccaatgtttcattcacgttgtaacatgtatcagtattttattcatttttgttgctgaatgatattctattgtaggccataccatattttgtttatccatacatcaccatcaattgatgaacatttgcattgtttcaactttttggcttgtgtgaagaatgctgctgtcaacatgtatgtgcaagtttttgtgtggacttaggttgtcattgctcttgggtagatagccaggagtggaactgctggatcacctgtgtcatcatttgaggaacagccagagtgtttcccaaagtggctacaccatttggcgttcctaccagcaatgtatgagacttcctccgcatcctcacccacatttattttctatcttttggatgctagccatcctagtgggtgtgaaagggtattgcattgtggtttcaatttgcattttcctaagaattgatgatgttgaacatcttttcatgtgttaattggccattatggatcttctttagaaaactgcccatccacatcctctgtttcctttttaaatttttgttttgtcttttcattattgagttgtaagcattcattttatattctggcaacaggtcccttagcagatatataatttgccgatatattctcccattctgtgagtggtcttttcacttcttgatgtcagtcatctcttctgcaaggcctgcatggtggtcttctgccttacttttgaaatgtgtcattccttgtcctcaggcctcttttacaactgagacccaagtactttcacgttaacatctggtcacaaatagtgttcccatttgatagatgaggaaactgaggcaagtaacagagaagttaaggacttcgtccaacgaagtcttctggataaatggtgaaggcaggattccaacgtggtgggtctgcaaccagtcagggatttgcactgctacttaacattttatgatcttcatctgtagcccaaaatgctttaggctgtatggcctgatctctttccagctttagaagaggtgcctggattagcctggaaaggttgctcacagagagggaggccgagtttcagatccctggatggtagaacaggaaaaagcccatgagttctgccttccagccagccccgggcctgtgtagccctgtctcccttcatctcctggggcccaggccggatgggagagtggtgagaaggtgtcctccaggtttgagagtgagagatttcagcagtggggagcagagtcccagtgctcactctgggtggggctgtgggagagaactcgtgtgcaccacgctgtttgcccttgatgtattttctcaggttctgacattcttgccttctgaacttttgagtaagacgtgggagaaaccagcaagagaggggagtacaggattgcaggtggtcccagataactcagggaaatagtccaaggttcctggggagtgatacatgtgccccttgtatctaagcagagggcttcaggggtgagtttctacatgtgggtgctgagagcctgagattcgaccctgaactgatttttgttgggaaatggtcacctggcctccagaggggatagcccttctggcctgtgacttcaaggtggtgggggcagtagcaggggagggaggaattcaaagctgctactgaaagcttctgaccttgatctatcacatcatataggacaaagggctgagatactagcaggagaggtttgggttagcctcctggtagaacttcccaactgtgagagggtgaatcagctgtgacaggcagattggtcctcttgtcctcttggcccccttgggcagtgatgttgagggacaagaggggtggatcttagtgtgtgctggtctgcatagaggccaagatagaggcctggatgagacagctccttaaggaggattctcggttcttttgcctcccccaagaggggagtcctctcctgactcactggcacaattagtcttgagaattcaaatacaaggcaagcctgaccttgcgggtaaaaagatgacaccactgacccagtatctgccagccacctgcttgcactgttctctgtcgagcagcgctgggtttgtctcaatgccctcggacccttagctggccctgctctgcgaggcagctggcatgcttgggcagcagcctctgcccatggaacacacggtaaaccaataccctcccgagtgaatgtgcctttggtgctctgtaatctctgccatcgggtgcaggctggaaggccggagccacgctcagagccagccggagctctgggcacagtctgctctcttgtgctcaaatatccagatcgaggcaggggtcaggggagtgtgtactctttccccctcagcctccctccctgtttcctctcctgccagacctgtagacaagtgcaagctatccggacccatcaagaccccaagataccgactctaattatatccaataaaaggaatttaagcttctatcaatcaaatactttttcttactcacctaaagctgctttgcacccatcattaccttcctctcttcttcctttccttccttcctttctgtttccagttacttaactgatcccctgctaggtggtgggcactgtgtaagccctggggatatagaaagctgtgccctggggttgtctggagacggggtaggggtgtcagcccagtgctgtatccactctgccctgcagcccgtgggtaaggggctcgggcaagtgccctgtcttctggggatgattatgatcagaggggctggctttgcagagggtctgcatttgaagggcccctgggaggataaatggcattgaaggcagaattgtttttcagattaaaaagtggcataacaacgttgttcaaagtctggaaagtaaaaggaacgagaaacaatcaaatctgactggcttcctcacacaattgctctggtcactgcggtggggtgggtgggaccttagcgggatgttggaggtggtggaggtgagctgagggccagggcacccttgcaggaggccagggaggtgagaacagttgcagtgtggggccaagggaggggctggtgttccccgggggtccctgctgctcccaggagctgagctgagctggcccagaagccctcaccagagtcctggggctccattcccccgtctgctattgaaggggttcaggggcctcttttctcctttgttttgctttcagtttttcaaagcaacctttacaaaataaagcacaccaaacccgcagtagatgcgtccacagagcctgcatttcttgccctggtggacttggctggctgagggctgcctttcctcacctcctccccatgtggccgcctggggagactccatcaggccactcagagtcccacgcaggtgggggtgggttgatgccacccctggctctgatgggtgtgtggctcctacagtgggccttcttgccttcaggctccagccctccagcttccccattcagctcacagcagcatctaaccctccgtggtgaaggtcctctttctggactattccaaatgattccttgctggatctattgaggccttgggcgctcctccctgccttttcagaggctgatttgctttggcaaagttgagcttcttcactcattgtcctcgcctggctttggggccaatctctccatcagcctcggagaggcggcatcctccctggagcctgcctgcatctacccactccctcccctgcctgctacctggcaccctgtcttcctgcagcagaggccctccctcttggtccactctctgagtccctgctttctgtctgatggacagttctgaggctgtttatgggaaaaggcttcaagggatctggggtctggcaaatgatcagtcccttttcctttgataaccctccctctacttcctcagctgctcatggatgattcatcccctataaatctcctttcttctctatgtccctctccctgacacaagaccttctaaaatcctaccagagtcactgagctcacatagcttcagtaatcggctgcctccattaaaattaaggacagtgtcttagagtaggctgggaaggggtggaacccacgtccttgggaggtgatagtctttagatgggaagatccttgggaggccccgtgctgattgggagcatggccttgggactcaggctgtctgggcttgagccctagctttgcctcttgccttttgttgaccttggacaaatcatttagcttttctgggcctcagtgttctcacctgtaaagtggggagaaggctagtacctgtcttatagcattgagaattaaaagtaatcatctatgggcacctagctcagcgactgttatacaggaagtcattactaagcattaacttttgctaataccactacctgaccttgggtagcactttataaaatgcttccccgagttcaccttcaaccatcccagttcttgagctggactttgaaccaaggcctctggctgcaagtccagtgttcttcccactatgcagaactaggtgtctgtgaatcttttccccatcatcatctaaatgccaggctccatccccaggtgtgacccacttcctctgctcaggggtcctgcctccttggcactggtcgtcagtaaccaccaggctgcaggctatggcctcctccctttgagaaaacacatcagcatgcaagagggtgggaatgacataaggataggcctaaccttaagtccatgcaattgaagaagatgaagagaaggaaaaaccccacatcatctacattctttagtacataagctgtcctcagtcacattcgcttcttcattcaataggtctttactgagtgcttactctgtaccggccactcactgttctagatgctggggacagaacaatgaatgaaacaaagatccctgccatgcggcggttccattctagtggaggcagacaataacacatttaaaaacaaccataataaataactgacagagcctgttagaacttgagaaataccctggcaaaaaatggagcagagtaagggtgattgggaatgggggcattgaagagttgacatttttaaaaaggggagttggtcagtcccggccctctgaggaggaacacttgagccaagacttgaaagaggcacagaagctggccagacaaatatctggagaagagcattccaggcagaggtaacagcaggtgcaaaggccctgaggcaggggcccacctgagatgtttgggaagccgggaagaggacagtgtgactgaatggaggttgtgttgggagataaggtaacagggagtagatcacctggggtctggtagccatagtaaggatttggctttggcctcagcctctttatagaatgatacattgtaaagatctttctgtaatggcaggtaaagagtcttctcattttgttcagctgcatactattccactgtatgtgtgcactatgttttaataactaggtttttaaaaactgcctttaaatcatagaaacatttaagctgtttccaatcttttgctgtttccaaaaaaatgctgcagtgaatggcgttgcacatataccattttcatttgggtaagtctatctataggacaaatttctggaagtggaattgctgggtagaagaatatatgaagagataatttttatagacagggccagattggccttcataaggactgtattaattgatgctcccagacagtgatttggctagggatgaggaggagaatctatccgcccacctcctttaatatgcaccccccaatatgtgagatactgttaggtacccataatttcttgtactcctcatgactctcctgtgacctgagttctcttgttcctatttcacagatgaagaaacaagcacagagaggttaagtaacttactgatgcttacacagccaggtaggggtagagcttggattctgacacccaccatttctcagcataacatttctcaccatttctgacaagggtaggagtcctgaggagccctgccctgctgccccatgcagttggggtttgagaacctagggaataggaactgagttaaagtgggaagcctgcctgtccagctctgcccaatgctgtgcctgtgtcctggagacccttgcaggccagtgatgggggaggggagaggccagcccaagggatctggagccacagtggctgaactggccagccccagccttctccctgtcccctccctctgccagccccagtggagaggcctgagaggctgcggactagctaattctgctctggttgaggagctgcctgccgctgtctgccgggtcagcttgctccagggattaagtttcagcatttcactgatgaaaataaatcagcctcttgattgccctgcatggccctgggaacctctgcagcctggtgtgtgtttacagacttcctgtaagtccccttttctgtcctagcctcagggactccatggctgctgcagaaatagcctcagacaagtttggagcctgaagccacccgggcaggtccaagcaggagaggagatacaggcctgccaagtccaggggctctgggatccaaacagtgcctggtagagcatcttctctgagttgtatccttgaggatccagatccaaacaggactttagggatcacctatacttgccctctgccattgcacagtggagtaaactgaggcctgtccaaaatcaccccttagaattctggctctttggctcctagtctgctgctgcagccaggcagcattttctttaggtctgtttgttacaccgtggctggttagagatctaggggcagagttggagaggtgagttttagctgctgctggaaggatggaggtctgacattcaggagaaccctcttgcctttgggggatctgagtaacaggaacaggtgccaggactagattttctagattttctgaaagttgaggagaagaacctttccactccacgcatctgtctaggtaggatgagtgaccatggcttgtggacatgggaaaacaaggcaacttctagagggttctgacaaggtcctagctcattcttgtgcaaaggggactcaggagtctcaccccaaagtcccttttctcctgcccctctttctttgctcaagcattatttacactcacaagactatccctcagggacctggggtgtcctgcctcagacactcctggctccagaatactggacctcagttgttcaatccctgggccatttatctccctgtgccctgggaagcagcaacagagctgttgatggatgtggggagcttcagactgcccaatctttacatctttacagccagtcgatgccctggctgcttatctgggacttatgcctttgattgcttaaaaaaattgttagcagcaaagtgttctttgatgtgtgttcttctccttctccaggggcagtgagatcagattttgatatgaaagctcaaagcttctcagctctctccttcttccctgccttcctctctctgtctgcacattgcttgagaaccttcgagaagcagatgggcgctcctcatgtgatgcaaaggcagaaaggcccaagggtggtgccctggcttctgtctgccatgcaggcctgtgcttcatggtttggtggcctctgcataagtgagtcactttcagcctagccctagatgggcttatttggggaaggaagcagatacccacccagatcctccacccacctctgcacctactcatgcatgtaaccacatggactcctgtactcatagccacctctcatgcatggagccacagggaccccttgactcatagtcacctctcacacatggaaccacatggacccctctgctcacaaccacctctcatgcatggaaccacatggatccctctagtcatagccacctctcatgcatggaagcacatggacccctgtagtcatagccacctctcatgcatggaaccacatgggctcctctgcacacacccacctctctgcatggaaccacatggatctctgccccactgcgtaccccaactctgccccactgcgtacagtattgggagctgtaattataaaactgcccagccagtttgataacccaacttatatgtggatgctgagagaatgggcctgtttgggatcaggaatagtgattgacctcacttgcagagatggtttcattcgtgtgaattataaaccagccctgaggcagtgttctacttgtttccagaaatgctttgagctctggtagcattgtgaggataaatgcataaaattcccagggaaccagtttgatggggacagtgctcacttgcctgctggagtttgttataaaccagcattgtgactttattgtcactctccactccttttttcttgttggatcttctaagatctaaacctttgcctcctccatctcctttcttgtttctccttcctttctgggaagcagaaagagcatgaatgtcagagtcagactggcaatgtaatcctgagcaagctccaacccctgagccttagtttctttatcaggaagatggcataacaatatccactttgaaaggcagttgtggaaccaagcaagggaacttccattaacgtgcaggcacatactcaataacatgcctgcctcattccattctaccctctccttcgcccttgctcccaaagccccatataccctctccccattcagtgaggactgccactgacatggtgtccacgtcctgggagcagtaagggtggggagaagcagaagcgcggtgagtggatatgtcccgaccctcatccaacacaaacatctgcctgggagttgacaattcccttcctgagtaatcctctggcactagggctcctgtcctgttcttagggaacatgctcctgggcctggccctgcccactgccttcctgggatgggaagtgtgaagaccctggaaggctgaggccctgccaggggtgcctgaagcttgtcctgctccgatggccctgtcttccctgtccactgggctgggaggcagggaggaggtcctggggaggtctaaggacatgttttcatcacatatgcagctgctgtgcccaccccaggcagcgggcccttcctccctctatccccagacgtttgaaccttgacaccatgcctatcttgggagaccccttccttctcctgtcctgactgctccctccagccatgtctttctcttccttgatggctgtccatagaaccagaagttttagagttcaaagcttatctcctcccactcattttaccacgttggaaactgagtcccaggaaaaggaaatcacttgcccaagtttaagcagtgaagtagtggcccagatggggttgaaacccaagactcttgagtcttagttcggagatcggtctattacaccccaggctccttcatccctcagtctagctcagggcctctcacctgtggtactattggcatttgggaccaatacaattgcttgggaccaccacaacaattgcttgttgtgggggtctgtcctgtgtattgtaggatgtttagcagcatctttggcctgtacccactagacaccagtagtatttcctccaggtgtgataaccccaaatatctgcagtattgtcacacattccctggggggccctggctacctgggggtgctcctctttcctctaacctctcatctttgtgatctcacctgtcccacctgcagggtgtgaagtagtctttcactggagacactctgttctgtttcctccttctgttctgggacccggctgcttggaaaccaaagcactcagccattctgttctttacgaggaagaacaaagagccaggccaggaatgttgctttatacctacgaatgaaaagaaagaacttgacaggaagggactaagccttggagggggtgaccagggaggctgggcccccttcctccctggagagacccctcagtgtgggtgaggggccctggccacctggctccagctgtaggtctgctggctggaaggatggtctggagggaatgggggcatttgcttgacctacagttgggaagtgtgtcttcattgtagaattgtccaccaatatcctactttcctcgcacagctagacctgcagacatttgtggttcttctgtaatgagagttcacagtctctgagcacccatctcatggcatctgactgagatctggcagtggggaggactccctctgagagccaggggccctggtggcaatctcactccagcactgaccatgtgtgacagtgggaaactcttcccttcgctgacttggacagatgaaatcgggtgggtgggttgggcccaatgaactcacaacatcctctggcttgaccatgcggggattctaggaaattgcctgggctgactgcccacagtgcggtgccatgtggcaaatctggggtcttgaagaatccttggcacctgagaagtttccagaaggtatccagacccaccctcctacctctagaacttgtgttttatgaaactgccctgctcagggccacctcagggggtacaggggatactgggctgcctctgaagacagagtaataccatcatctttcaagcttagtttaacccacccactattgggaaagacttttctcctgctatttcctgtagtttgttttaagaaaaaaaattgtctttttttttcccccaaatagaaacatggtaagacgaagtgtattcttttttgaaccagatttgccatgccctgccctctgcccaagcccccaggaagtcctttcctatttatgcatgcagctgaggttgtgcccgtccttctctccttgtggtccttgaggctgaattcatctctgcaggtggaagtggcaatgcattttcaggcacaccattggcagtaatcagtgttgggataggctcagtatttgttaatggaatggcatcacatccttgtagtctgcaccattttggaagcctcttctctatgctggccattccaggccatgatttttgagcagagatcgggtgggccaaattgtatgtcctgaagcttaagcactgggtgtgatacatatgggctggtgagatagggtcacagaggtactgctcagggggcacagggctagggaagggagacggggaagcccacgctgcactactcgtgttctgtcctttggagcacttctgtgttctgtacactgtgctgagagcttttcatgtgttatatcagtctttgcactacttactgagatacaatgactagtatacccattttacagataaggaaactgaagctcagccaagtaattggctcagggttgccttaagctagtagttggtagtatctgtattcaaaccaatgtctgacttccaagtccatgttcttaacctggcagatgctgaagtgatgagaatgagaagggccaggcataatcttaggctgcattaacaaaagcatggtttccagaaaatgggaggtgacaggcctgttgtgcctcttttaagtcagagcgcccacatgggctgtttgtgggtcccttgcttcaaagtgataaagaacgactggaagcaagtgcagagaagcaaccagaaagtatgtcaggctcagggacttgcagggagaggggttgcctgtcaaaggggagattcaggagggcaggcacgtctcattcagtatctgaagggctctagcgagggggcgattggcttgttctgacccactccatcgggcactgtaaggccagttagtggaaaagagggctccagggtgttttttcctatgttgagctaaaatccactgttacggccccctaaagatgagctgggcttttggaggaagacagtaaaatccctgtacctggaagaatttgagtacagctaggaacagtttttgccaaacctgactctcttattatttgcagctggggagcattttcaaattcaaagtcccaggccccattccagacagttttgcctctgtgtggagccaggggatcggggttcttataaaactccctgggggctttctagtatagctagtccccctggatgatagtggagaaccatcagatggggttgccactggcaggaactattgtgtggtagtgttttccaaagtaaggttcaggttccaaagtatggtcagactgctaattatatatgaactgatattaggtatatttattttgatgtgtattggaaaaaaaggtatgtattttgcacattcaatctgggacatcatggatattgtgcttagaactagtttaagttaaatgaagtttatttttataacttacaaaataataatgtagatgatattcagatggacaaataaacatgaaggttgcgtgcaaacaaaatctctgctaatactgttgtgggttggttggggtggggacaagtgggtgaactggggtgccttaaacctttcaagagcccgaggtttgttggttagttctagaagactctatggaggtaggaggataattgcaatagtttgtccaaactgtggtcttccccaggtggagcctgaggcatagaacccctctgcttcccctcccctggtctccttatttttagtggtctctttgaagtctgtgacaccgagctgtcccattttatctcatcagtgaagataggtcagtggccagggtacagggcactgggtaccatttttgttcttccccttattttctttctttaccctcaaagaacagcagccagagaggggtgctgaaaatggcgaggggctgagggctcaggtgtctgaggggaaacacagggagtagttgggctgtgcctggcagggctttccctcccaatctcgctgtaccaaacttagctgggaaggtctgggcacgaggatggggtagccatagctcagggcaagcctgtgtctgtggaagcattttggggttgcaaactaactggggccctctgcatggagacaccagtcgctgaagctcccactggcctggccgcaaagcccagatcacctcctgtccactctgagaattgggttgggagattcaattgatatgcaaataagtcacaaacaacatgttaataagagtggggatttggtgtcttattatcagttagggactcctggcactttccagggcacatcaggataatggtgggaacttgagggccgttcacctgcctttcagctgcatggctctcggatctgggtggttgggaacgagggtgaggcattgcgaactctgaaaagtgatactctgctattcatgatttccacagatgggaacaaacagaataccaatagccagtcaattggaagcatctcaggtggcctggaggatcaatatacctggccagacacacactggccttcccaaagttaggccctccaaaatgtcaagttgccaagccagaatccaaagctttgcactgagaacttcatgttggggctcctgtcccctcctggagccctgcctgggtgacaccccagtccttctattcaggtcctgtgttcacctctgggaagtgcaggaccctgtggggttttttctttttccttttccaagccaaggaagtgttctggctcctggactctgccctgtggaggggaaagggggagagagagggaaaaaaagatttccaccttattgttcagcagctggaaaattgttgtcatctgttctgccttccatttgctgagaatggaaaaaaaatgtggaaaatttggggaaataaatctcaataccctcataggacctctctcccctccctctctggcccttgcatccctgcctttccgcttggggctcagtttcactttgctcccagattctctccctgcttctcttcagggcactggggctgccatgggtttgggactggggctgggctgggctacactgggactgggctgggctggactgggacccggtggggctgggctgggctgtgctgggaccaggctgggctagactgtgctgggtgagagttgagcaggggctggggctggggctggggctgggctggggttggggctggagttggactgggctggccacttttcctgactcccggccggtgggagtgaagggcttgggaagccaccgtgatgtcattcaagaacggcatagctgcaggatgataagtgaagccctggggacccagctggctgaaattacagacagttttatcccactggcttcctacaagccagagtgaggcagagcaagctgagctggggagagagcgtgcaggagagtggagggagggagggagtggggtgtgtgtgtgtgtgtgtgtgtgtgtgtgtacatgggcaggcaggcggcactggctcctcccacccctgacagtcggagggagcttgagtaggacacagacagcacttggagctgcagccatgtaggaattattgggaacttggggcaccaggatcaaatcagagcgggcttccctccgcttcctccctctccctccctccctccagagggtaagtgtctgctgggcagttgttttgcctgtgagtgttcttgtgtggctttctgctggatctgggctggggtgctcgtgcttctgtgctgggagggtgtggaggggcaggctctgtcacgaccccaccttggaagggcttgtggctgagtggggctgtggcccgctgtgctgctgtctgatgtggatgtgacgggcctggtggtccccttcctggacttgcttctgggacacgtaagagccatagctttcagggcgagggtatctgggttggtgggggggccgtgtgtctgagttgtcctaagtcttgtgggggtaacggttcgtcttgtgcgcgaatggggttggcagagggaatgaggtggatgcatggatagctctggtgagatgttattcaggacgccccctccctgcatctttggcctgagctttggggcacctccagtgctcaccattccccaccggcctcctgtgggctcccattcacggctttctcctgactttggcagagattttggcagcttgactctcctctagccagggatctctgagtgcccaggctggcaccctggcctggcagagaaggacttcagcttgttgtgggctctggagctatttttaccatcctgagtgtgcctgtgatatctgctgcccgtataggctgagggtaggggtgggagtgccaggctcgggttatagcttcaggctggggggaacacaggccaggccggagtcaggaggctgggtctgagaattcacatttgccctgcaggcgtgggccatccagggcagggcagatcacttgccctccaggcccctggtctctcgggactgaagtcaaggtcacgatcaggttttctgctcctactccctttttatggagggcatggtatgaattcaagtaagaagatacctgggacaattgccacgggtccttcctaaggagggtccggggacacatttatcatcatcgcttgacagaagcaccatatattatgttgtcctgtggttctgggtccacagacatagttggagagtccaccttccaatgcctccagccccagccatcttcaccttgaagcagcattagggacaagagcactgaatagggagccaggagttggttttgtacttccttgccgggtgaccttgggtggtcctgagcctgctgagcttcattgtcagcctataaagtgaggggtgggcagggggattaactactcccctaaggcccttcagctctaaaagccccagggcttttaaaaagctctcttggctgagccaacctcccgggccctggagatcccagttctgctgtcccccagagggcctggagcagcagaggcagccgtgggtgggaggggctctattttttatttcattctgaagctgactttctccatcttcaaggccacaggctgacattgagatttgggctccgtgtgggtcttggaccttgagcctccctctttttttcttggactcagcagaatgggaaggtggccaggagaagcccagctggtccaccctccctgggtccagaggcaagcttgtaggtgacactggtgaggtcacttgcttagaggacaaagccacctgcgacaagactgacagcacagccctgagaaaaatcttgttctctcctgttcactttctgaaggtgtgtgctattaaatggaaagaaaaacaggtgtctatttgtcactcatggactggtctgtccctgcccacagggttccaaggccctgtgcttgttgtgggctctggagctatttttaccaaaaaatctttggtaattttttttaccaaaaaatctttttacgtgttcccaacgtgcacctaagtctcctgggctgcacttggcacctgccctctttgctgtttcagaggctgtgtctcctctgtgtggctctccttcagaggttccgggatttctcttcaacctctaattctgcagatcttcagagcccctgcagaagcccattccccttgagaaagttccagagctcgctgcaggctgtggggaacaaagggctgcctcaatccccagctgtctgtgggaagggaagctggcatgggtggaggccaagactgtcacagactgagccccaggaagtccctgccaccaatgccaggatgtttcaggaggtcggggtcttcctggagccacatgctggggttctccacggggccctctgtaccctcatgccttcctcacatcacttcccctggcaggttaaaacccagtggagcaccctgagccacttcttaggctcccgcagccgcaaagcttccactcagtgtgccgccccatttcccctggatggagcctggcattctccatgcaagtcatgggtgacagagaggatccccagagacagcaccctaacttttcgatgcatatgttgtatcttgggatccacagatggtttttggggtgttcatcaactcccttatttcaccagatctcccaggggtcctgggtctagggaagttaatgtccactgggctggagtgtagctggagaggtctgtaggggatgccatggggtaggctctggctcagggacctccaccatgctcagcctttgctgcagaatatgaggaatacatgtcttcatgtttcggctgcactgactctcttccctcacctttggggagaaactcggggtccacctagaacccctgatttttcactgggtggtggtgaaagaagagtatctcaatggctgacagaactacataaagctttctcggctactcggtgtaaggcaagaagcatttatggaacaagcactcttctctagggccattctgtacagccatgcaggttacatattgaacttcaagaggcatcattcacacagaccacattgtggatggcaccgtctgggaaccggccctagggagagggagagagagagagagagagagagataaaggctcttcctcaacaagctctcagcaaagtgggaagacagacatggacatcagtaatgaccattctgtgggtgactgttgtcacagtagagatgtctacaagggacaacaggagcaccgtagaggtttacctgagtctggaggacagtagggaagaagttagattaagggaaatttcccagggaagtttgaactgagtctgaaagcatttgcccaggaggttgggagtttcacgggcaggatgaggaagggcattgcacggaaggaacagcatgcacagaggggaaagagcatatgaagagttgagtaggagtagagtggagggtgttctgggtatggaggacaaggaagtgaggcttcagaaggtaggcagaggcctgttgggaaaaggtctgacatttccagcgtgggggttgggctttaccctgtgggtgatgagagctgttgaaatgtaaagcaggggatggagagaggaaaagtagagagtgcttggatatgccaggtctagcttaagagccttagctcctgagtgctatcactcagcaaagctgcacacacactctcgaatcctcacctgacaggcctgcaggccgggctctgagtgggtaagtggtcaatgcaagctgatatggccattaagatggcagctatgtttctgagtgctggtgtgtctggctgccgaggtggggtgggaaggcgcacttccctgtctcctctccagagccatcccttgtggccttcctggacccagccctccctcctgtcctggtgcctgccccagccatagcctctcctgcctcttcccatggctggggcagagtgtgtggataagggaaaatgcaaccagaacttgctctctgggcaggctcttggccaagcttcacttctcatcaaagctcacctacctctcagatgcacgtggccttggattccccactcctccttttaaggagttttgcccagtctgcctccaaacagcctatgtctggggtaggcacggtgcttcttcctattgtcatggcactgattttcccccacgttgggtggtcatcacggctctgggtaatgcattttaatgaattgttatttgctggacttggacccaaaggactttttatcatgaagggactcatcctgaaaaccttagtaactcattcgctattcaaaacctacctgctggtccgacagggaagggtctgtcttcactgagtcattgccaatgaaggtgactcctttcttgcagtcaatatggctggcaccttttattcttcatggttgggccgtctgtcctaacatctaaataagcaaaacctccctacttttcatgaggaagagaagtggggtttcttgatctcagagcccaaagtgctgatcagctggggcgggtttctctagatgtcctccagccatgtgtgtgccaggacccctggagagctggcaaaaatgcagattcctggccccaccccaggcctctgagtggaagtccctggggatagggtcctgaaatctagatttttaacaatctccagaggaggttcttgtgaacatcagaattagaaaacagctgccctgaaaccgtgtgactttaacatcccctatttgtttccttcgttcttttttaagtgtgtgagatggctgcatccttactttcctgcatcccagcctgagctgcatggctagtgccgcacacacctctgcacccttttctgggagggagccccggggagtgggtgcacaccctagtcagctggggattttcctcagagctttccaaaagcatgactcgtgcatctggattatggctgccctggaataaaggccccgtggtgcaatcaagctcagcatcgagggtggagtctggaactctctgcagctgctgagaagagcagggagacatcctcagacaaagacagtggggccatggagagattttgggttttgcaaccaccaagaggaatgggcaggacactggacctttcagcccacaagagcagatgtccaggctggctgggcttggggcctggagctctccacttggggctgcctgcagcttgtgtttctgcttcagtttatcccactccattgtcacccgtgacaatgcccacagcccccaaacatgcagacccctccctctagcccatgccccattgttctggatgtccagcctcctctcatctgagatgcattcccctgaactgatcactccctttgtggctgctgggacttcaagaggatggctctggagacccctcagattaagagctgtaaagccacctccccagcctcccttaagtccctctcttatcctcctctaccttatttcactcctgtcctctctgcccccgtctctcttttgcccttcctgccttgatggattgaaaccaacattgtgttccggcttcttgtggtcccggtaaaaagctctaatgtggccgtggtggatggtgagaagggaatgatgagagtgtgtgtgccggagtgggggctgggggacttttgtcttgtctctggtgggaggaggaggggcacgtgctccacagatcctgctgctatgctggggtttcagcagagtcctcatcagggctggacaggcctgggatcagcctgggtattctcaaaacctcccttggataggaagaggacaactcagcaaaggtgctgagtggcctggagggtgcaatctggggccaagagacatttccatttgtagttagcgaacaggagttaattaaacaatttgcatctgttcgattttcttactatgccttagtggcttggctatgattgttcctgatgttgttgctgcaaacaggagcccacttggggatagattacatgacagaacaagtttaacattgacattttcaaaatcgatgctgagtggggcttggccacaggggcaaggaagggctgagatatcaggtagtcaattctctctcctgcctgggggatgccttcatagtttttctgttagtcatgactgagatgctgcaggggcctatgtgctttctgatttgaatttgcccccatggctctcactgtggaacatgtctaagtggggaagccactggacacaccagcctttgctttgcagctccccacttctcagaccacatgagcatgaacgtgggggatgaggaggcacaaaggatggaggggatcactggcccaggagggaaattctggcacctcacagtgtaggtggcagagggggtgccctggctcaggagggggcctgcagctttctagggacagtgagaaggaaagccagctcttcagatttcggccaacttgtccaaggggccccatcctcaagagaaccaccccagagctatgagtgcatcagaggctcctgtcttcagtgctttgccccctagaaacaggcggctggggtctcttctttttttttgagatggagtcttgctctgtcacccaggctggagtgcaatggtgcgatctcggctcactgcaacctctgcctcccaggttcaagtgattcttctgcctcagcctcccgagtagctgggattacaggcatgtgctaccacgcctggctaattttttgtatttttagtagaggtggggtttcaccattttggccaggctggtcttcaactcctgacctcaggtgatccacctgcctcagcctcccagagtgctgggattacaggcatgagtcaccatgccaggctgaggtctcttcttttatgtgtagcaaggagctcagttctttggagagagtgggcatgaaggtcagcctccctcatcctacagggagaggacccctttacgatgataatagggggttggaagaggcagctgtgcctggtcctgcatcttagcagcctttaggggtctaggcacagggccaggttggtggagattcagaatgtattttagccaaaaccccttttcagttcagaccagccctgggccctgggccctgggctgctgcaatactttggtcctgtgttgtctggggctggtgttggctgaggtcccaaagccttggggaaaactgggggcagaggggtggatctggagaggtcagtaaatgaggagggcatccagtccctggggtgtgtgtgtgtgtgtgtgtgtgtgtgtgtgtgtagagggatgcaagtgcctggtggagcatctttgtgccagttctctgtgttgtaacatggctggcctgtggtctgtgtgtgtgtatgttgattgggatgttcctgttttgtggttgtctgatcacttgtttttggccatgggcttctgtcagagtgtttatttttagaggctgccacttctggcctaagggctgatccttgggcatggtaggaacatttgtattttctgaaatatttgtggctttaagtatttatttgggggtattcctgcctgttatgtgtttattctaatttgtgtgtatgtgtgtgtgtgtgtgtttgtgatatgagggaggtgtagcataataaaaattacatactgtttgaaggaaattagctctgattttaaatcttggctttatcaggtagcattgttggcacataaatggtttcccctctcagaggctcagtttctcccttactgtgatgggtgtaatactgtctggctcggaggcgatggctagagaggatgtgcgtgtagagtgcctggcgaagtgttggcgtttgcgctgtgctcactgcacggtggtcactgttgttggtatttgtgtgtacatgttcatgccggtgctgtctgactgtggttcttggcattgtgtggcacctagtgtgtgctcatgcctgggtgtttctgatttgggtgatctcttactgtctttttgtctggctcggtgtgtgactgctggtgtctggctggagctggtgcagtctttgggagctggcttttttccttgctaacggagagcctggattagagtaaggggaggtgcgtgcgtgcgtgtgtgtgtgtgtgtgtgtgtgtgtgtgtgtgtgtgtgtgtctgtcggggctggtggctgggctgctgactgtacagggtgtgaaatcactgagttcctctgggcggggaagttcttcattcctgagtcagccctttggccccgagccacccagcgctcactttttccttccagagaaagtgttgctcaggggggtcctcagagctgtctgcagacaagaggaccctctcccccatgaagacatcttgtttttgtgttcacgatccctaagacgcttcccctcctgccctagtccctgaaccccctgcatcagcaccctatatgccccccatcctccagcataggaaaagcgtgtcccctctggcacagggactgttggcttggctgagccccaccttggcctgttcttcaggggcccccgggctggctcagagcagtgggatcaggatgctcgtctttgcagacctgctgtgatcctgcccggcataccttcccaggacccgcgtccctttcctggagtcttgagtggtatgggctgagcttgctggtggaggggtaggggtccatcaggagtgggcagtgctggggaggagctgggaggagcctctggaaatgtggcagtgggcagcatgaatgacattgtatctctgaatggttctatcacatcctttgcattgagctggagacaaatctagctgagggcaagcttgtcttagagagtcccagctctgccttcagcctccctgccaccaccaccttgggcatggtggggccctttgctgcaccctactgccctcctgggttctccccctgcttccgtgggcaaaggctatcctcggggcgactggccgtccatgctgatacctctatgggcattcaaggcaatggctactctcctggcattctgcctctaatccagagtgggaactccagacatcgaagcaggggtgagactttttgagatggggtggcggaggggactgaggatgctttggaaatggtcattcaggaattaatgatactcataatggtgatggttagggctcccagctgttgaactcccatcacgtgccaggaactggtctcagcatgtcatgtgtcaactcatttaaactcaaagcacagtgtatttaatgaatattggcaatttcagatggttcaaccagattctattattatccccattttatggaccaggaggctggctcagagagttattcatgcctctggtcaggaagctggtgaaatgccagagctaggcttgggactggagcgatttgcccccagcacttcctgctcagtgttgggctccactgcccggccctgaagctgagtgttggtgaggctctgccccaaagcctggggtagaggtctttctgtcagctccccttttccccacctcagggtggtgagaggaggttttaggatgcagggcatgggagctcttagcttctttctctggcagagtggatgatacccctgcctcccgctaatgtctgttgtctgttgtctcccctccggctctgtcccttgcagaggtggtgggacacacgcaggggccactagatgggagcctgtatgctaaggtgaagaagaaagactccctgcacggcagcaccggggctgttaatgccacacgtcctacactgtcggccacccccaaccacgtggaacacacgctttctgtgagcagcgactcgggcaactccacagcctccaccaagaccgacaagaccgacgagcctgtccccggggcctccagtgccactgctgccttgagtccccaggagaagcgggagctggaccgcctgctgagtggctttggcttagagcgagagaagcaaggcgccatgtaccacacccagcacctcaggtcccgcccagcagggggctcggctgtgccctcctctggacgccacgttgtcccagcccaggttcatgtcaatggtggggcgttagcatctgagcgggagacagacatcctggacgatgaattgccaaaccaggatggtcacagtgcgggcagcatgggcacactctcttctctggacggggtcaccaacaccagtgaggggggctacccagaggccctgtccccactgaccaacggtctggacaagtcctaccccatggagcctatggtcaatggaggaggctacccctacgagtctgccagccgggcggggcctgcccatgctggccacacggcccccatgcggccctcctactctgcacaggagggtttagctggctaccagagggaggggccccacccagcctggccacagccagtgaccacctcccactatgcccatgaccccagcggtatgttccgctctcaatccttttcggaagctgaaccccagctgcccccagctccggtccgagggggaagcagccgggaggctgtgcaaaggggactgaattcgtggcagcagcagcagcagcagcagcagcagcctcgcccacctccacgccagcaggaaagagcccacttggagagtcttgtagccagcaggcccagccctcagccattggcagagacccccatccccagtctccctgagttcccgcgagcagcctcccagcaggagattgaacagtccatcgaaacactcaatatgctgatgctggacctggagccagcctccgctgctgccccactacacaagtcccagagtgtccccggggcctggccaggggcttctccactctcctcccagcccctctctggatcctcccgtcagtcccatccactgacccagtccagatctggctatatccccagtgggcattcgttgggaacccctgagccagccccacgggcctctctggagtctgtccctcctggcaggtcttactcaccttatgactatcagccatgtttggctgggcctaaccaggatttccattcaaagagcccagcctcttcctccttgcctgccttccttccgaccacccacagccctccagggcctcagcaacccccagcctctctccctggcctcactgctcagcctctgctctcaccaaaggaagcgacttcagacccctcccggactccagaggaggagccattgaatttagaagggctggtggcccacagggtagcaggtaagaggtattcagtcctgactccttctaccccttccttatttggtcttgctggggggaggtgcaggtccagccatgacccctaagcagatgttgctttcactggtgggaggaggctctcaggagcctatatgctagccagttatcccttcctgcattcattgtctgataggcaccaagccagacaccaagtttcaaagttcaatgtcaagcaattcctgccctcaagaaatttacagtctagtgagcggacagatacacagacagatgatttcattagagagtaatgtgtacggtgacagaggtgggaccaagatcccagagcctgggaaagcaaagcttaccacctagggcagtcagggaaagcttccaggaggtggtgactttggggttggagtacagactttctagacacagaggagactctgcaattgcctgtcgtgctgtctgtcctcagactttagttccttgggggagacgtggagaaggctggagggaggcctttgtagactcaaattccctcttaggtcccgctcctagaggccatgaaagagtccgagagggtatcctcaagcccttaggctctatctgctggggcggggaggccaaggttccccttctaagtcagttttcctgttagtctttgctgaggaccagccctgtatgggaagtaggtgctgagagacaaagctccttttcctatcagagagtgggcttctcttttgggagagaggaaagtgggacactcagaagagcttttggggagacaaaggcaagaaatgacagcatgtctggggccatgttgggagagacagctgcgaggttcccttcccactggtctaagcctatgcccattccacaagggtggctgaacttggcaggaaaacctgttgggtgactttattctggaggtggagcccagacaggggtggaccagagactgtggatttgggtggaccttgtgccagcccctcagctgacagggtggtgggagctcagcgaggaggagaggagcctgggcagctgtctctgtcctccaccccttttcctaaatttaggggaagctgagtcaccatgccagctgcagggagggaaggaaacaccctccctggagatggaccgtgggtttagggaagcagcttggggcaggccagctggctcaggacctggtgtggggacacaggctccctgctcctatacttcagagcagagcagagtccccagctccactattggtataatagcttgaaattggccattgcaggagtatttacaccatggaaattggcaatcagcctcacctcccatagagagctggcctagcagtaacaattccttttacctgagcatcggaacaaaggatgggcagttcttaacctcggatgaaacgctccatgggtggtccatatgggctttgacttctgccttctcccacatctgggcccctgagataaagatacccccctggctttgtcagcagagatccttttcttcttggtttttttgaggtgagagggatggggctttctgaattccctgggaatttaattcctctcccaatattttgcaaggttggagtggtggcctaaagattagtgacacgctagtctaatgaggggcaggatccaggagccttctctctgggggagcagaatacatttcctcccctacaagaacccttccatgcagctctcctggagcttgctcaagaggaggccataaccctaatggccctgggaggatgcccatcttgtagtggactgccttttagccctttctctcctaccagctttcgaaggcttgactgtcaacttccatattctgtagcctctcaggctttggctgccatgaagtcatagatagggaaggatactgttggcacaatgttcccattccctaaccctgttgccatttcctccatcaactgggagtgactcaagagaagggatgaaatgtatagaggggacacttatatttggctcccaggtctatgaagttgcctctttggttcaagccctgtcattatgacagaatttatgtcagcaggtcctgcatgagtaacttccttagtagcctttcagggtatctgcagtgcctgtgtagataaaggcagacagacaagatcaatgtgtggaaaagtctgggaggcagggaagatagatttcagcactacttctttctgctctgtctacatctctgccgtaagaagctggaacatacactttgacatgagtaacctaggaagctcagatctgtgggagaacctcttcatggccatgaacttgatctggtttctcctggctttcctcccccaggtctgccttttccccattggctgtcctccatacctcagtctcaagtccctggtttattccactttgatccaatcacccttgtgccttattccagcttaagttgtagaggagaaggtaggggcagttttctaatttgataaagggtagggaccagaaatttatagcatacatcacactttcctgtggagcattggaagcgttcctattagagccagggacaaaataaggatgtctgttatcaccacttgcatctaacattgtattggatgtcctagccagtgcaataagacaagaaaaagaaataagagtcagagttggagagtccaactgagttatcttatgtccctgattctgtggctggactgatctcagatgtctctagaggtggagatttcaatacatgttggaaatcagatatggatcttatccttaaggagtctagagtttaatagggggaaaaaagaactggaactttaaaatagtcttttgtaataagagagataaggagaaagctctgcaggagagaggtgaagcgattgctgtcagctagtgatggggaaggcagtgttaagtgtggttttaaactgagccttggaagatggaataggattttgaaagtaaacgggatcactgggcagagagggttcacagtgaagacaggagagcacagaaaatgtttggagaatggcaagtagattgagaacatatggtctgtgtgagtgacagtcgggataggtagcctggggtctgtctctggatgatcttaaataccggactaaggagcttgcatcttacctggcagcaatgtaggaagccattcctgtggtttcatggggggaacatgccatgaccagagctgaggttcaggatgatgtgtctggtgggtctgggcaggaaggacaataaatgggagagactttgagccaggagatgataggagcttattagatagcctaagtggtgcggggctggattagggtgctgaccataggaatgcaaatgaagagatgatgcagtggatactgtgggggtagaaccaatgcacttatgtgttgattggctggagcggatgagggagaaggatcatcaaaaatgattctgagctccatgaatagaaatagaatgatggttctgttaacaagcaggaaggcaggaggaggacgttgggtggaagatgaagccttggtgttagacatgttgagtttgaggggagagtggagcctccagggagagacatatggaaggcagctgaactttggaattgagtgtgaaagaaaaggaagagctacaggttttggaatcattctcacaaaggtgatggttaaagctttgggtgtatgtgagatctcaatgtcagagggcttggagagaaaagaacttaggatggaatggccatgaagggaggtagaggctgtaaaggggctgagagtgagtgttcgggtggtggcaggagaccaggacagcatgtcatcatagaagtcaagatggtaaagggtttcaaggaggaagggcaggagattagcagtgtcagcctgaagagatcatgaggaggactgagaaaaatccactgggcttgcaaattaggcagccctgtgtaaaacatcaaaggcatatttttagtgcgtgttggtgacagaaaccagactgtgggggattgaggatgagtggagaaggagtgaagacagcaagccaagtactcttttcagtggttttgtgataagagaggagagagtggtagctaaagaggatagtgagtgattgggaacttttttgtaaatataagagtcatgagaatgtttgtatgtagaagaggaggggagtaggttggacatggggggaggaaggatgagaaaaagaagagaaagaaagaagttgatagaataaggtctctaaggaggtaagaggggacaggcctaggagcccatgtaggtaaattaggctcaaccaggaggtgagatacctcttcatgaaattagaataaaggatagataaagatagagggaaatattgatgtcaagctttgggagcttgaagtgaaaactcttgtgtttttttttttttacattttgttctgaaaataggagatgagttgaaggctcattcaatcattcgattcaacatgaacttctaatgggtgctgcttgccagtctaggctttgtgaaaatggtggcaaataaagatccttgcccttacagcagagatggatactgagcaaataagcacatatacataggatatgtcagataggtgatacgtgccattgagataaagcagtgagaggtagggggtggctggctgcactttacatgggatgatcagggctgggcagcgagagatgagccccatggagcaacaagtgcagaggccccgaggcaggagtgtgcctggcatggctggagtagagtgatcaagggaggcatagcaggacacaagttcagagaggaaatgggaacagggacagcttacagagggtctttgaggtgattgtaagaatggtggcttttactccgtgtggcatgagaagccttaggaaggatttgggcccaagagtgacatcatctgacttgttctgaattgaccagggtgggcaggatggaaggagggagagcagttaggtggctgctgctattgatctgggcagtggccatggaaaggggagaagtgctcggattttagacatattttggaggtagagccaacaagattactgatagattacacatggaatgagagagaaagagaaaagtcagagacaacgcttaggtctggggcctgagcaactaaagaatggagttgctctttattgagatgggtaacaatttatgaagagcagtttcaggggaacactagaaacatgacttttggacacattaagtttgagatgaccatgaaacatctgcagtggttggataaatgagtcaggagtttaaggagaagaggctggaacttagagatatgggaattgttgacgtgtacataccagattaagcatagcactgggcaatgtcaccgaggggttgaggacaggtaaggagaggtcccaaggatggagtcctggaacctcccacattccaaggctacagacaggaggagggaaccagcataggaactggcatggagcagcttgtgaaggagaggaaaggtaacatagcttgaactctgggggccagggcaggggcaatgttggccactcctgtggcccctgtggtgtgaaggtgggttagaagtcaacaaggggcaaggaaaggataacatagcaggtccttctagtgcatctgagaaggttcatcttaaggacttttctggtgatgaccagaagctgggggccagagcagaaaagcacaaggggttccccaggaaagaggatcactcagatggctgtggtaaggagccagggtgtgagagagggtgacccttgggctcaggctgggtgtgttacctgggtccagggagaggcaggtgcccaggaaaagatgggtggtccagggacaggcctgctgcctatgggagcaggtgagggatgcgtgaattctcctggtcccacgatggcacctctgcttccaccctggggttagaagagagggaaacgctgtggtgctggccagcaggaggtccatctgcctcttggagaagcaggaccttggatccccctctcttcctgtctgataccttccccacctccctccagtgtgtgcccagataccagagtcagaacaccaactaatcttgattttctctttgtttttgttgtgttttgtcctgtttaatgccccgtcccctgcactctctgtgtttcccatgtccatctgttccctgtgctgttggtggggtgcctgccttgccccatatcctcccttccttcctgcctcccactccctgctggctcccctggggtggggggtgggcagcgtacaacgccaggctgcagggcatcggacacagtggcagcttcccgccccctcctctccaccggctccaatcttcctccctctctggtgggtggctctccttcccccttctccctttccagctctttggcccacttttgagcatcagtttcttttcactccttcttcatgtgctattccttccaaatctttcccaccttcttccttctctcctctgtcttttcctctccctcttctgttgttctctggtttccatctgtttctccttctccttccccatttctcactatcctctcttctgtctcctcacttacttctccatccctcctctctccagccctctctccctcctgtctgcatgagccagagctcacttctgcatgaacatgggcctcatgctagccttggccttgcctgctgggaacaatgcctggaataactagactaacattcagggtcccctgaggagatgcaggcctttgcaatgagggtgctcaggagggctctggacagtccagcactccggccaccctggccagactgcctgggctgcagggctaggtctcggcaggagccaggctgagctttgcatggggccaccagacacaacacagagtggtgccccagcccctgctgctctgtccactctagagcatggcacaccctggggacagcgtaccccctctggtcccactcctaatctctgatcccatggccaagagtcagaagccctgggttggggtcctggccctgcctgagaccacctctgtgaccttgggcaagtttcttaactgtttagagctcaatttcccagtctgagaagtggacagatgatagtcctgtcctgttgtgtattttgcacggtggtttgacatgccctggaccttgtggatgcttcactggggtcacagtaattcatttgagaatgatgccgtccactaacatctacccctggcctctgggacacgcaggcccttaggcgttgagccctggccagggaatcacctcttccttcccctgctcctctgacactggaggctgggtcagggaagatgccatgctcaggcctgccctacaccatgcccctgagcagctccaggaaaaggcctaggggaaatgggaactgttgattcccaatgtcagttatctggtgcctccatggtcccttcttctcccagtccagggatgatcaggagatggctctagcagactgctcccttcaaccgcccctccctcctttcttcttcctctgcccttctctcagcccagtggtggggagtgtagtgttcagctgggcctgggtaggggcaggttctgggatggtgggcctgcctcaaggggagctggcatggcttgccctagggctgctagtgtgatcgccgtgtggctttctggcaccctggcccagcaggtggcctcccggatcccctcgcttctggagccccaggcatgctgtcggacacccagccctgctacctggacctgaggaatccagtcttttggaaatcggaagactggaaagaagagctgggtctgtgagggtggcagtggccagtctggggggtgcagaggaggcacatcatgaagcctgacaccagggtactcgtcacgtgatccaggggtggtgggcagcagtgctttgccaaagtacatgtatcggtctgtgtcagggctacagctcccagaattgcagggtgtgcgagtgtgcgtgtgagtgtgtgtgcgtgtgtgtgtcagatgaaggggattaattgcctccagtctggctcatgctaggggagccttggagtgagctgttgtccagcacagcactgtcctggcagaagagtgacgcctccctgggaagggggctgctctggtgccctgctcctcaggtctgggggcctgtgtggaaccctggggctgggataactgctcatcctggcagggctgtggggaaggcctgatgcccgtgtatgaagcagcccttagagaacgcccagggctccttgaacatagggtgttagggtcctaaagatactttgttgtcataagggtaccccagccttctcagcctcctgggagcttctcttcctttcttcctctggccacacggcctcctgctggggtaggggctggccctagaggttctgagggtgacccagtggccccactatgtacccccatcatcccagtgtcctgctgccatttctgttaggctgtgtgtgtgtgtgtgtgtatgtacatgcaagcatgcacatgtgtgtctgtgcaaggcacctgcctctgcctaggtgggtgtaggagacagaggccctgagagagagaatggggccaaagactgagaaagtcctggggtggagggtggtggcgggagggagggaggtggggagagcaggcctatttttattatcagtcagactctgggacgtgagagagggtgttctctccatgacactggttgtcagcttgtgtccagacaccctagcttggctaaggaacaatggggctctcttctctcccctctgccacgccagtctcccctcccatagagcaagacaagagagagggaacatgtctctccaggcactccaggcggatctgggcttgccaagggggacaacagtgggacactgtgttcaaagaatgtgagtggccctgactggccattggtgccatggggccattggtgctctgcaggggaggggctggccccgtgggagtggaatgcagggtcttacccttccgcagagggaggcactgccctgcagctccttagctctttggaggtcattccctccatttccctgcctctggtcagaacatgctcccacgtgccattctggtggtgatggagagaggattgggaaggtgcagctcaccctcagatggctgactgcctcatgccaggatctcacattctctacggatgtcaggtgccccctgcaccccaagctgctgcaggcatctgtggcccctgaacatggagaaagctttgggaaggttgggcagaatgttctttgtttgtccaggagattcggtgcctcaaatgcaaacagatctattttttaatggcaaacgtcagatccccaagcagggaaactggccaccccttgaaaaggcagagggatctgccagaaagagctgctgggggcagaggagcccggaactgagaccagccctaatgcatttattttaaccttggggctgaactgagttccaaaccccaagagcgtctcccaaatgggcttcttctgtcacaattattgttagaaaatcaatggctatgtctgtttctctctaatgtttttgccaggaatgaaatcagtggcagtgttggtccaagctgcccaggagacctgagtgggatgggggctccggggagctaaggcctgggagcctggggttgctgcagggttgcagcaagctgcccacccttcccaaaaccacgcccttctttccttcaggtagatgctcctggcagcccctggctgggtctaatgggactcctatttttctgttctgcgaataagggctcttcaaggtgtggggcttgtttgctttaagtggaacagtttgtaagtggcagagtgaggtcagagtctagtttactgtccccatcctgggcgctattttcttagctgagatggcagcagggctgcccctgattaataaaaagcccaaagcggagactcagggcaccactcggtaccttctgcatttaatgtgcaaatgccagtcctgctgctctcctgatgcgccccccacccccgattatgggagcccctgattatgggagagtatgagggcgtgtctcagagtggctgtgcctatgtgagtgtaagtgtgtgtctgcccgtaggcttggcagccggcagcctgctgttcatgacaagtaggaaggcttcccaggtggcgctgtttatggcagcctttgtggctgtgccagactgggggtgctggggggcgtggctggggacatgcagtcctcactgtggatggcagaagatgtttctgtctgaatgagggtgatttctgcttggctgtactggcacattcctaggggctggcagtgtgtgtgcagtgtgtgtgcacacacgctgacccatgtgacctgaggcctttgttaagtcctagtggtggtgaaagcagggcggggaatctcttcccagaagagagtcaagaccagaagcccacgcttcaggctgggtcttggcctctgggacccaggaagtgagttttctaggattctgggagccagctcaatgaggcaatggattccgtgcctcagcccagctgtgggaagagggagtgggaaggaaggagggtgagattaacagcatccccaggcctgtggaatgggattgggatgggaagtacagaaaagcagatggagcacacgacttctctctgtctgctcttcagctgggagggacatggtgggatccgccgctatctttggggcagggaaaagggggcggggagctaagaggccagtataaggggagttggtaagaggttcagcggtacaccggatgaagttggggaaccccagagaaagccaaaaatatcccagaggccaactggggctggggacttcgtaacaaggcttagtcatgtctttgtttctccttgggagcaccatttgcaagatgatgcaatttagccctttccaagagttcttccccacaggcttgatgttgctggttggttgatgcagttgccttggagactgtcttttccctccacctcccctcccttgtctggaagctctggccctccgcctccaggggttggaagtagttgacatctgtttcttgtatcagtcctttgtgttcttggtctcagctctgtgtggagagattcctggtgaagtctgagccaatctaagcagatcccctctcctgcagagaaaacctggggtgtgaacagagttggacccaggagggctgaggggaagacaatgggggatgacaggcgagccccagcatggcctctgagctaggaggcactgccttctctgatgggattaggccgattgatcatttcttacacaaaaatgctcattgtcctctacaccctgctttcctcccaggggtacaggctcgggagaagcagcctgcagagcccccagcccctctgcggaggcgggcggccagtgatggacagtatgagaaccagtctccagaagccacatcccctcgtagccctggggttcgctcccctgtccagtgtgtctccccggagctggctcttaccatcgctctcaatcctggagggcggcccaaagaggtgagtccttaagctgtatcttggggctatggagggtagtggtgcccactttaaatctccagaaacctgatggtcaacttggcactgatatcagtatactcagtgatttgtctccccctacgtcctcacccaaactctcttctctgacatgtggagtctggggcccattaaatagctctatgttcccacttcttgcattaatattgagattgaagtttcctttttgattcctagagagagtgccttaataaggtggtaagaatcctggggatgatataggtgaacacaatttcaaaactccaaactagatcctggagagtggcaaaattatttttgagccctttgcagatataaggtttttctcaggagatttaattttcattccaaaagatttgcatttctaagacatttcagtagttggaggcagtgagtctcaaacttcatcatgagtaacaaccaatggggagcttgttaaaactgtagcttcccaaatccacctccagagatttcagggtagtagatctggatgggacccaggaatctgcattttaaatgtgtgccctggaagattcagatgtaggtggtccatgggccacattgagggagcgagtgtactggcctataaaagccaggctaatgagtcattctggatagaagtggcttgtggatatcttttctctcctgcctgtggcaggacctgtctcctgccctgagcaccagtgaggagccaggctgacgaggggatgtgggggctggttaactcactgtcctcatacctcaggtcatctgaaggggaaatctctccttctcatggtttccctctttttctcccctgtgttctcccacagccccatttgcacagctacaaggaggccttcgaggagatggagggaacctccccgagcagcccaccacccagtgggggtaagaattccctgtgaagctcgtcttccctgtgtaccctccagcccctcagctcaaccctgcctgtgggagtgccccaggcctgagggttgggggtgacagtgccccaggtggggccagaacgtgctgctcctcactcccatggccccttctcttccattgcttgtggccattgtcttctccgtcgtccacactcacacatctaagggtgcagccgccccagttttagggtccagactgagtgaccatgggactctgggctcccacattatggagttttcttacttgttttgagtctttttaccgtccacactcaaaagaccctaccatcttagcgtgactctttgtgacttgactttgactttgtttctgacctccatttctgcctgcatccagacacctcttccattccaggcaacctatttagcttctaccaaggagagagggacccaggaccctcaggctgacagagcccccagctcatccatccttggcctccaggcagaggcatttagcccccagcccctatacacttactggggaggcagatccccaaaggacagagacacatccacctaaggccaagacccaaatgagccaaggcatggggcagtgttcctttttatagaagaagagacatgaagaggaactggaggaggtggttgtggggaaggaagtgatggattaataccaggccacgagggactcagtgtactcaggagaggcctgggtcagcacaaaaaggagacactggtgctgttcagggatcaggttggctgggcctggctcaagctatccactggccctggtgagaggagggagaactggagctggctgtgcattcccctaggggctggctgtcctgtactggagaggaatgtggcaatgtacgtggcccctgtgccaacagaacttgtgttggctgccatcttgggcatgaggaggctgaagctgtgactgattggtggccccaggaagccgtggctctcccttgagcagtactgtccaatggaaatatactatgagcacatttataatttaaaattctctagtagtcacattaaaaagcataacaggaaactggttacattaattttaataacatttttgttaaatccaaaatatcctttcaataggcaaataagtcaataaaaatattgagctattttacaatctcttataaaatttaagaagaaactggtgaaattcattttaatatgttttatttaaccccagtctaaaatattagcatttcaacgtataatcaatgtaaaaaagaacgggatgttttgtgttctttttcatactttaaaaccctgtgtgtgtttcacacttatggcatgtctctgttcacactggtcaccctgcaacggctctgcggccatgtgtggctcgtgactgctgtgctggacagggtgagcctagagcaggttacgtgagagccagctctgcagcctcttgtgactgcggggaacctctctcactttccatggtgacatctgcttccattcactgttagctgtaaatggccagggaaaggacatcaccttgccttgggtggaagccacctgggctgtgctagaactgggttttgccttcttctctccctcctcttggccagccatgggtacctcggtgagaagtcagaggttccatagacacacagggttagggagagaagacagaaggtggagaaacgtgtggaatttttctctcaggaagcaaaagacttgcctggctttagcgtcgcccactcatctgcctcagcagaagggcccaattgcccaggaactgggggaacgaggaattcaggagctggaggtgaacaagggaggaaccaagagagagctcctgccctgtctggtcctctcgtccgcttcacctcctcacgggcccacctgcgcctccgctgcaccagttggttaaacatgcgcgtacctgtgggctggggctgcttcgtggttattccatgaatgaccgtctctgaggccaggcatattatttcgtaattaatttcattcaaccgccattggtttgacaaacattaataagtgtttgataagcgtctatgagcaagacaccatgacagggaagagggggtgtggcggtggtagaaacagaatctgtgtgtgtctatgtgtgtgtgtgtgtgtttgtgtgtgtgtctatgtaaagacagagggaggatagacagagacatgaggcctagagctatcccatacctggaggtgtatgtttgtacccatttgtcccctatgctgtgtttgttctttggacatccaaggacagagtgagggtgaagggcaggggtgtgccactcatccggacccctgtgatatcttcctgttcccacgtgcatgtgggtgttcacctgcacaaacgagttatgtatgttgcttgcatggagagagagtgtattttttcattgttgtaagattcctgtaggtctgactgtcttttggggaaagcagcaggggcagggagggtcgtggagcatttgctgctggtggttcctgggcatctgagggccacagctaatctgttgaggccattcggcaggcagagtatccttggggctgtggtctctgcaggctcccaatgtcgttgataggagacacagagttcattttttaacttcttctcagagctgtgtcaggagacatggcagctgccacccaggtatctcgtgactgggcataacagccaccctgcagatcagctctgaatctggccaggttcttggctaatgggaaaaagccagcagccctttctgaccttgtgtgttacatgacacttgtaacccagatgggcggcctgggaggagcccaggcttcgcatagggagtgggtgctcttggccacagactataggcttctcctccttccaggacactgaggtttggggggacagagccccacattgagaagttctctcctcctgggcttttcaagggacatgcttggccgagggctggcctgaggtctcagggttggcgtggctctggcccattatctccttctgtctctgtcctttgcagggtgtgccatcctgaggcccaattttcttctgttctcttctgaatccatccaagtacatgttttaaatggactgtgtgtgtctgtgtgtgtgtgtgtgtgtgtgtgtgtgttgggtgagggtaggaagagggatgagagagtattatagagaaggtcagagacagctgcaaaagcctgcgtgtgtggtataagccattgcaaagtaaagggactgcagcgagaagctaagggcctaggggtggaaatgattctctcaaggttggggccagagccagggcaaggttgccatttcctgagtctttccctttatcctttaaactgttcaaatgtagagaaatacggaggcgggaaagggcagtggagccaaagcgctgggcctcagggtggttcctcggcaccgtctccagccccccagccctcactaagcgtgccctcacgtgcctggcgtgtctgccctcctgcccacctctcactccctgtgtctcccctcttcttcctggcacagtgcggtcccccccgggtctggccaagacacccctgtctgctctgggcctgaaacctcacaacccagcggacatcctgttgcaccccacaggaggtgagttgggaagagggaagatggggaggggggccagggggaggaggactcctgtggttctggacagaaacccgggtctcagaatctggtcagcagccagctttgtgcccacactgaggtcaggcctgggttggggctctctgtgtaggggttgggggtgacagatttccttgcagccttcctgtctgttgacttgtggagtttgcacaactcccagcctcctctagcttgaggctttggaggcctggtctcagtttccttggtggtgttgagatctctgctggaagccacacattctaggtgttcaggccctcgggtacacgtacatgggcgcacatacatgcacacatgggtacacacacatgtacacacacacacatagagtcagagaagcatgcccctgctgctgtgtgccagggcctctgctggcagcccagctggctctgctctgagcatccacgaagcatcacaggcattcacctggcatccacaaggcatcacctggcattcagagtggtctctaggtctgcctcttcaggcccagagaaccctaccagagaaacccatgactagcagtggccatcattgcctgccgtttcctcgatccccttgccctcagcccaggtcttctcctgactgtcaaaggacctgccacctccgggcttctgactctccctggcctgtgctcatcccccatccctactcccgatgctggctgcatcttactctgctgctgaggagagcagcccaagctctgaggaaggaaggaggatggctgctcggcctccctggggtcaaacagcctgtcctgttggcacggtagagggcagggccctgggcctgtctgggagaaggtgctcctctgagcagacaccaccccaggttcacacctcctacctcctcctcccatttcccagctcctctccttcttatggtggagggagacagggctccctgggcccttggtggccatgtggggccactgaactcagaaagctgctccctggactctggttttagggctgggtgggggctattggggtcaactttacttttttccttagttaccagaagacggatccagccaggtaggtgggcagtggcatgcatttgtgacccatgaagccacgcagctgggcatagcctcccactcagagtgtcggcatggccagggacactgagccacgggggatcagtagaagggggctgggggctgcctctcaccagccagcacactcctgcttgacacttggcccacagagccctgggcacaggggctgcgaggggctcaggctcctgagagccggggactcaactatgcctcggagccttggggtcctttgcagggtgggcctcggccttccccttggagtccttctgtggacagcgcaaatcggccctggcctcaccccagctttcccatctccgttttctccacagattctctttctcaagaaataatccctgttaatctctttctctctttttccttttttgctcttcctcatcttcaccacctgcccttctttcctgcctctccttcctcccacctctcttctcgtcttccctcagaggaagatgaggggaaggtggtggtcaggctgtcagaaggtaagtagcatttgctgtgacttcctgctctctgggtctggaaatggcttttcaaagcagggcttgaagaggctggctggaggcagctctctttcctcactgggactcaggcgaccaggcacatggccttcctgtcccccaacgcttggtgatgagataccaccctggacacctcctgagtcctgatgggggagcttgtagctgccaggcgctggctcaggcacagccagtgtctgggggctcctgcagtgtcaccttgttgaccaaaacgctcctcttgcaccttcctctcccagcgccatttgcaccagcctgcctggtgtgcagcagctcatagaggtagacagggagggactcagatcccctttcccgggacgtgctccacaggcatttctcagagaagagattctccacgttggcaccactgacgttttggcctgaatgacgcctttttttttgagatggagttttgctcttgttgtccaggctggagtgcagtggcacgatctcggctcactgcaacctctgcctcccaggttcaagcaattctcctgcctcagccccctgagtagctgggattacaggcatgcaccaccacgcccagcaatttttttttttttttgtatttttagtagagatggggtttcaccatgttggccaggctggtcttgagctcctgaccttaggcgatccacccaccttggcctcccaaagtgctgggattacaggtgtgagccactgtgcctggccctgaatgactctttgttgtgggtgctgccctgtgcactgtaggaggattagcagtgtccctggattctacctgctagatgccagtagctctcactcagtcatgacaatcgaaaatgtctccaacattgccagtgtcccctggggggataattctcctggcgcagagcccccatcttacagccacgatttgccctctggaagccctgcctggtttcctatcaacacagaaagtactaagtctgtctttcggggatctcagacaacttcgcgtgtttcaggaaatctatggactcaccgtgtatacaataatgcattgggattcccatgcacgtaattctgaaaagcagtttcaaggagttggcatgtctatgggtcccagaggaacccctgatttagatgagccctgcactgggcaccagggaagcagagagggggcataatcaggtgggaggccttggacacaccaggagcagaactcgagtgaggactcaaaccagcaggtgaaacaaagtgggtgccagcctgggcgggaggccagggtgtggttctgggcactggcatccccccctcaggaagatggggcaagatgggtgctgtgatcacttccagttctgatgggttaggtgttctgacttcccacctgggccctgggccgattggctggttttctcaggcctatttcccattttcctttgaccacaccaccttgattttccaccccctaagcggggatggcctgtgctcctctaaatctgctgtcacccaggtaggatgattggagtttcccagaagactttgccctctcctgaccagctggggtttgggcaacaacatcaggctgctcaggggctgcagaacagggcagcttccagagacagaacaggtgggccacagcatgcttccctctgctgggaacggcccctccttgctcccccgcagcctcatgcttggggaaagggctttctcccaagctggaggctgactgctggtcctggcaaggcaggagctgggagagagagtctagaattagctggagctcagagccaacgtttctgtgcttcagatgccggaccacgcaataggctctcagctctcctcgcagctggttgactttaacagaccagtggtatctcaaacactctccagtgggaagggccatggggtggattatccagcaagctggcagagcctggtgattgtgtctctcactttggggtgacttcaggggcgtgggcctcgacaggactgaactatctgccaattgcacctgctgagttactctcatcttacagggccccaagtgctctggccagagccacagagtttggaggggaaggttcttaggggttaactcagccacacccatcgttgtcacagatatgcagctgacatcagcactgtgggtggtgttgggggatctgcccaaggtcacagttaggaggtaatggagccagactggagttattggtctcctgtctcttcctcaagtggccatttcaaagtccttctcctgcctgcaggcaccgtgccctgggattccagcgtgggagttggaattgctgcccgtggcctggggagtggagcggggaaggggcagggagcaaagctgtgggcagccagttccttatttcctgactcatgtgccactgcccgggtcagactaaagctcattctttgctgaccctctgaggctctgcttgatttccttgctgatactttgatgggaaattcagaaaaaaatgccagtgaggcaaaaatggccagaggcaggattattcggcttggggaaaagaataatttgagggatgtctgctatgtcccaggcgctgtgcgaaacactttacattcattcattctttcatgcattgattcatttattcataatactttgtgcgctgactgtttgccaggctttgggaatataaggatgtgttaaggcagctggtgaggagagtgatgccaacagacatttcaatattaggcaaaagtgctgagctgaggtaggaataggatgtcatgggggctgggaggagggggcatgtggctcaatctaaaatgtttggaattctaacttttgagcttctagatctgggacctgggggtttccatattcccttctttctttcccacccacatgtcttgattttagttagggtgggtgtgccccttctctccaagcaaagagcctctttgggagacagaaaatgcacttcagggtgtggacaaggagctgacagtgccagaccggaggagcccaagtcaccctgtgctgcagctgctcttcaccgccagcagccacttggcagggtttgggctcctggaatgttctacatgaagcaccctccctgtccccacctctcccgccctgcccaactccctgtagcctctgatgcagctgctccaggattggagggaaggaggaaaacagcaggagaggtggtgcgagtgaggagtggaggaaggcagggatgggcggctaggagcagcggaggcagcagcagggctggttctgaacactgggcctggaattggcaggaaagaattaggaagaactttctttcctgcctcttctcacctgatcctagctgggcaggtgggtatcctcattcccactttgcagatgaggaaacggagtcccagaaagtctctagtaagtgcacgggtggtgggtgaggggagagcttgcaagtagaagtatattgtcctggggtgggagagagagaaagagccagggaataaacagaaaaaggaagcattttcactacggagatctgcatctgaaaacttgggaaaactaatgtttagccctgaagatgggttttaaacagttctggagatgaactcaggaaatcaaataacttctcaaaggtccttcccgctctgggttcatgaggagtagagattgtatggaagggcttcgttcatctccaccccatgatctgggactggaagggcaggtaggggtggcagtgggagggcagaccagctgaccaaggaagaggatgcactgggaaggagaaaggaggtgggggcccggtgagggcagggccaggtggggctgggtctgagtggccttggctaggttggccacccaatgcacaagggctgtttccaacattgtggtcagaatggatgctgctgcttctccctgggcgagccatcctgttccccaagttcagactcccagtgtcttgagaactcctctggtgttctgcagtttaggagctgaaggggccaatgggactgttgccttaagaacttggccatgctatcgagccatctcagggtttctaatacactgtcccatgggccctccatgcaatcttgccatcagactcccaggctgcagctcaggtgcctgtgtttaggccagaagcagttagtagacccagccttgcctaatggcaagtaagcacccgcaagccacaggcttggctgtgtcctgaccacaggacggggtggtgtggcccactttatctcagttttactgttgctagcaggggtacctgtacttctttaaaagggtggggcgtagggcaatgtgaattgcttacctaatgtgtgggtcaggggcctggtgggaaactgatggttcattccaatggagcaacctaggacagttgatggactcttaaaaggtctgggcagagcagtgagggatggtaaagcaccccgagtgctccctatcaggagcagggagccatcctcccaggccttaaggaaccaggagggagctggagggcagggctgctgactggagtgtggctagagggaggtgggtaggggatgtagccactggcaccttgcccttctctctccctccctctcataccctgccagtccctccttactagccaaaggccaaagctatcctgagccagagactaagggggtctggatgacatagtaaataaaagtctgccttcagggatgcagatcagggtagagagtagatcaggagcgacgtcagtgaattggggaagagcacacaccttcacagtgtcattcacataggtttcaacttgaacttcagggaatgagaaaaatggatgtgtgcctctgaggtcttactatgtgtctctggatggggctggagggtaaggatcatgcttctgtgactttgtggagcacatgcagattgagggcctgctgtgtgccaggtgctgtgtgagggctcggcacacagatcagctaggcaggctctgggagcccacgggcagccaaagagtggctttctctccctggctgggagagaggtggtgccgagagccgtggggacctgggtgtagccatgatgagtgcctggaagggtctgggaagagttttcagagagtgacctagggtggcaagagacgggaggggagagtggactctgatcttgggtgtcatttgcatggctgtgggtgagactccctctgatgttctcttctcccaagttgggttaccagttgcccaagactaaagacactcactgaaactattggcttcccgacttgcagagggttgtatgtgcagtgggtaagggcaggttggggccagactgcctgggttccttggctgactgtgccccttgccagctgtgacctgggcaaggtacttacatcccccgaatcctacttttcctgtataattgtttgctctttttatcactaggaatagccctatggagttggcttttctctgcctgatgggctgaagtgctggatagagccagctctgggtgtcctgtgagcctatgggccctgtctaggtcacccagagccagcttgtgagtctggagactttggtgctagtgttcactgccactaattatccatgtgtcctggcgcacggctccacctctctgggctgaggagataggttagatcaggggtcagcacactgtggcagctggtcagatcctgtccactgactattttggtaaagaaagtttgattgcaacccaaccatgcccattcactgtcctgttgtctatgtaagctgtcacaccacaacagcagagttgtgtagttgcaacagtgacagccttacccaccagcctaagatatttactattaagtctttacaaaaaagtgtactgggcctggtcaggggatatctgcattgtcttctagttccagcagagcctcgtgcttgggtggcacagaatccatgcctttggtatgaatttggcctgggccttctgcgaggaggtgggtggcctgggctggttgagggaggatttcgaggaggccttgctggcactgcctacatggattccagctttgggtgccgaggtgcctggttctacatcaccttgtgcctgctacctagaatagacctcccgtgcctgcctctttgcagacaaactgccccagccttgtccactgtcttgctgttgggtggagggggttctgtatggggacaaaagacagacgggcaggctgtggctggagctgtgtgcagactccattgcagcctctgggtcctgctctgtaaagggtcctgtgctgagggaccatcctcttccggggtctagagaggcctctggcctgggtgtaggatgtcagacctgagggccaccccagaagccactccacggaggccatgcccctatgcagcaaaggctggaagcaccctgctagcaccctggtgactaggctccttccaaattaaggttttctttgggctaaggggaggaaggttgcatttcagctagctggaccccaggcctgtcacccatgagggacctggaggagggacctggaggacctgactattttggtaaagaaagtttgatggcaacccagccatgcccatacactgtcctattgtctatgtaagctctcacaccacaacagcagagttgtatagttgcaacagtgacagcctgacccaacagcctaagatatttactattaagtctttacaaaaaagtgtactggccctggttaggggatctctgcattgtcttctggaggagacctggaggagggggctcttctccaactctgaccattgcagtcttggccagcaggggctgcaggggcctggcctcctgagggatgcacagactctggttcttcagtttctcaggctgatttcagtggatgccttagttgtgggcagtatggctctgtactcaggccaggttcctcctgggtaagacagggacagggtgggatttggaggtggtaggaatgacattcctcccggatcatggcccggggtaaacaagagcgttctgttgcttcttcctctttcaagcggagttcgtttgggagctggcctcagaggccgtagaggagttgggcaggtgccggtctgggagtcgggccatctggggacctagtcatttcccttgtcgggcctcagcatccatccttatctgtaaaatggccttttctagcgtgtgtcccccaccccctcttaggctgttttgaacaccaggtagtgccgtgtataatgaggtcctctgtaaactaaactgctcagtgctacaggaatgccagaggtgggcgatggaatgttgagttccgcctgggaatggggttccctgatgccagtctctagaggaatgctgagtgtgtcaggcagagaggggtgggtgtgtcttggcatcaaaggggctggtgagtctacagcagccccacagggcaagactcaccagtgcaggcctgttgctaggtggccaaggctgtttctggattctgggcagggggtggagctcacatgaactctggcactatcctgggatacaggcaaggcagggatggacctctgggcccactgtagggccccagactctagtggcacgaggagaacctggaagggcctgggtgctgagcaagatcattgaagaaagagagcagccaaagggggtgccagctatggacagcctcctagtccttggagggaagagtctctgatggccatgttctgaggcggggcctgggatccatttcagggccccctcctctgagcaaggccctggtgaaaggtcactgcagggcagggtgggtctgggcaggcaggagccctgcctgtcctttgggggctattcctatgttcccaggcaggagtccaggaagctgtgttccaggggaggttgggggggacctgcactgcacccctgtgcatctgtgctcagtgtctctgtcctcttgccccttccagagccccggagctatgtggagtctgtggcacggacagcggtggctggaccccgagctcaggactctgagcccaagagctttagtgctccagccacccaggcctatggccatgagatacccctgaggaacgggaccctgggtggctcctttgtctcccccagccccctctccaccagcagccccatcctcagtgctgacaggtaagccgggaaggggcagtgggtgggggatgggaatccgggcctgggactgggacgggatgggtgaggcctcctggatctgttgcctatggcgtggacaggcagaaagcatacccagatggcggtaccttgcaaaccagttcatcaaggtgcattgagggcacatgtcctgcgcgctgaatcctgtggggagcccagtgacctataattcccaggccgcattcaattccgcccatccaaaactgtgctggaaggagtgaagggtaccacggtgaatgtggcaaagtccttccccaagttgaaaatctaccaacagtaatgacttatgtagtgggctcatcctaggtacctggcactttgctaagtgctttatgcagttatttaatcctcgcagcaatcctaggaggtgagcactattattgttcccacttttcagaagaggaacctgaggcataaaggtgccacagctaagcagtggcagaaatcagattcaggtggaagcgtgtgattccagagcccgcatctctatcctctgccccagacctgcatcatggcgccctccctgcacaggatgagagtcagatgggcccaaagcccacacatgagtgaagggcttggagctcagaacaaggggccattatttctggctagggatgcagcgaggatttctgagggctggaggcatttgtgaagggtgtagaggaagtagcaggatgttgaaagatgaagaaagagagacagggcattccagaaggacagcccagcagggacagaggactgggctgtggccatgttgggagtgtgaggctgagggcatgtggcctgccattaggggatgcctgggtggatggatggctggcatccatatttctgagtgcatcacacagagatgaaagcccagaggtgggtgacagtccctgctgacaggcttagtggaggggtgcagcaaggagctgcttgactggggtagtgggggtgaaggtggaggggacaaagagatgggatgacggcataggaaaggagggttgcaatcagctcaggcaaggcatcgagtgccaggcaaaggaggaggacctaggaggtgtcgcccccaggaggggagactctgccctgaccatcccttcttcgccgtgcccactgccctccctagcctgggatgtcacagagcctgcaaattcccctgccaggcccagtgggtccagtttgctgcacagtctacattggctcaatgctgagcctcccctgcaagtgggggcaccatgggatgactaggggagcagatgagcagaggcaactgtcttctggattctaagccaagcattccccttccccagcctcttaacaggcagcagcctgcgttgctcaggaggcctgactctggccgagggttgcatttcctattttaaaggaaaggggattttcctaagttgtcccagccacccattgttgatgttcagtgagccctggcattaggaagttgttcattgtttctcactcaaatccctcctgctgaagtgttggccctttccaggaagctagcctttctcccctgggattagccttccagaactccattttagtgtctccttctctcaccctgctcagcctggctctgtctcccactcctcagaatccagtttattctggattataccaggaggtggccttctgctttggccccttctgggatgcaaggtagactttgccctagcctggcccctgaccttctccttgcccttggctcttgcctggcccaagagcacacccccaaccaaaacctcatatcaccccgtgaacctgagcttatccagcctggcccagggagggccagcccacaacaagatccttccagcctgcagctccaggttttggcccattggctaagtaaggacctctccccatggggggttcctggtgcacagcctgcctgctccctccctacatactagtttatgtaaggcccctgtcaacctttgtttctctcaccatagttggatagaaatttgggtctagaaggagtcagggtcacctaatccagtcctgtcattttccacatggaaaaactttaataagcaaaaaaactcactggccatcacattgtactgctgtgctttcatctgtcactccatgcagacctagacttaactttacaagggaacctttgactgtggcaattaccccaggtatagtctcctctgaactgagttgtttcagagtcagaattggtagtgacctctgagctcatctcatctaacctcccaatgcaggaaattccctctacagcattcaggccaataggtctgtcagcctctgcttaaatgctcctaatgacaggagcctcattaccatgcaagacagctttctccattggtggccacatccccagtggctggagagcagaccttacaatgacctcaaatcccctgatgtgaaaccttcccctgtgattccttgtctttgcttttttggagccatctaggagtgaaagcccaattctagcactctctgtcaatgtttaaggatgatgatatcacacttgaggaaactgagtcaagacagggctactcccagtaggaacaggagccaggaaactccattaggaatttctgtgatgctggaggctataacatgacagccacctccagtttcgataggagagggctcttcactttgacatggctcaggagtgagcatggtgcagtggggaagacgtgggctttggaatcagacacagctaagttgaaaccctggtcttttataagcagtgtggtactaagcctactgcttaacctccctgagcctcagtttcttcttctgatggttctgtaaggtaacgtataaaaccctgatgtccttccgcactgccagtgggaccattcttactgttgttcatggttggagggagggcagacagcctgctgtaaatccacccttcattcagttctgtccactgacatcgcaacctgccatctctctgcagcacttcagtggggagtttcccgtcgggagagagcagtgaccagggtccccggacgcccacccagcctctgttggagtctggcttccgctcaggcagcctgggacagcccagcccgtctgcccagagaaactaccagagctcttctcctctcccgactgtgggcagtagctacagcagccccgactactcacttcagcatttcagctcctctccggaaagccaggctcgagctcagttcagtgtggctggcgtccacacggtgcctgggagccctcaggcgcgccacagaacagtgggcaccaacactccccctagtcctggcttcggctggcgggccatcaatcccagcatggctgcccccagcagtcccagtttgagccatcaccagatgatgggtccaccaggcactggcttccatggtagcactgtctccagcccccagagcagtgcagcgaccaccccggggagccccagcctgtgtcggcacccagcaggggtctaccaggtttctggcctccacaacaaagtggccaccaccccggggagtcccagcctgggccggcaccctggggctcaccaaggcaacctggcctccggtcttcatagcaatgcaatagccagccctggaagccccagcctgggccgtcacctcggagggtctggatctgtggttcccggcagcccctgcttggaccggcatgtggcctatggtggctattctaccccggaggatcggagacccacactgtcccggcagagcagtgcctctggctaccaggctccttccacgccctccttccctgtctcccctgcctactaccctggcctgagcagccctgccacctccccgtcaccagactccgcagccttccggcaagggagcccaacaccagccttgccagagaagcgaaggatgtcagtgggagaccgggcaggcagcctccccaactatgccaccatcaatgggaaggtgtcttcgcctgtcgccagcggcatgtccagtcccagtgggggcagcaccgtctccttctcccacactctgcccgacttctccaagtactccatgccaggtgggcctctcccccttccattttcacctctcctgctgatgaagtaagtagaagagtgaaatatctatcccagtgtctattctgacattctcttggcagacgaccctgggtgaatcactgacttctgggacttagtttctttatccgtataaagagagttggaggtatccttacgatacgtgtgctgtggttgtggatgctgagatgaggatgtggatacagatgaggatgataaaaatcataatgaatagtattactgttatgattatcatcgtcctcatagccattaccactcattgagcacatgctgtgtgccaggctctgagctgagtactgtgtcatttaagcttcttggccacttagtaaagtaggtattaatattattaaccccagtttacaaactgaggcttagaggctctgtcacttgtctagtatcatacagtcaagaaatggcagagccaaggcttccaatccaggccacgccaccccaaaactaatggtcttcaagcatcactggagttgtctttatcatgtgtccatatcttgggggtcatatttagcatgaccttgaaaacctgccttccaaacctggatctccatacctttgccagccccacagtgccacatcactcctcgtagacccaacttcatcgaaactcatgcaggtttgtgcagtgaattcttcacttatcgccagaacttgccacctttgcctctacttagaaagctcattgtctaaacacaaaggccaactttgaacttgactgtgtgcacagtggccctggatgtttgaggcagatttagaatgttttgggcagcctcagatgggccccagctccctagattctcccggcgtcactctcaggtcctgccctgagcctgccaagccaggacacctagaatgaccctgcactgcctgtttcctgccgcccaccggggacatctggttcccagcccctctccttgaaggatgcaaaacttctagtagctgggacacttcctgtttcccaccatcttccctgcttaaaatagcctttggagtcaacacaggaaggcacgtgggactgcagccgcctctgacagctcgttaaacaggccacggcagcagtggggcctggggcttcagacagagaaaggcagcctgcagcagttgcatggcccagctgcctaacccagagaccttccttagcacacggctgccaggaaagggagctgacctctcccctcacactcgcccggagacagatcccagaagcataagggagtgtaaatcataggttgaaattgactaagcactggagacacaacttgtgtctcctgatctgctctcttaactttgcagtgtctttcatgccaacttctgtctctgaagacaggagaggaaaaatgtggaatcctcatctttttctgttctccctccctttttgtgttttctttggtgccaaaagctgaaggaagaggttgagagtgagggccgcacatcctgatgcttagacaggaagatacagtttagctggtcctaaactgactgctagggcctcttaccaaggtcaccatctgtgtgacttgggcaagtcacttctcatccctgaattcctccttttatgtaaaattaggcagttggactgtgtcctgtctgagctccctccagaatctaatgttctatgacaaattcccaaggtctgcagagtctgggcatgggtgtgtgtgggggtgctgtctgcctgagaagtggggtgcctgacatgcagtagatggcctctagattctaggccagccatcacctgtttgatccaaagagaagtgattttttttttgttctatgtgatgcagaacataggccttccctgtggaaagtgaggagaggcctggggaaaagggggaagaaatggatctttctgccctcatcttcatggtgggtatgctgaagttgagaaactgaacctgtggagaaaggttctagaagcaagtgttttaggccatgggagaaaagctgtaggaaggctttagtcacagtcttctagggaaagggggacacggggtggaggaaggctttcagtgggctctgtgggaatgcagtgccaggccctccaccaggaggtggctcagccacccagatggcgggcaggggataggggatggatgaggaggccgaaggtcccttccactgtgttcgcatggtgttcgaggacatcagcttttgatgtcagtttcctggggctgccataacaaaggaccatgtgcttagtggcttataaatgacagaaatatgttctctcacagttctggaggctagaagtccaaaatcaaggtgttggcaaggttggctccttcctgatgttctaggggagaatctgtcccaggcctctctcccagtttcttgtggctgccagcatccttggtgtcccttggcatgtagacgcatcaccccagtctctgcctgcaccttccatggtgctctcccctgtgtgtatctctgtctcctctccttgtaaggacaccaggcatacaggcatactggattaaggctcaccctaatcctgtgtgacctcatcttaatttgtctacatctgcaaagaccctatttccaaataaggtcaaattcacaagcactgggggccaggactttgatgtatgttttgggtgaacacaatttaacccataacactttcttcccttctcctgctttagacaacagcccggagacgcgggctaaagtgaagtttgtccaggacacttctaagtattggtacaagcctgagatctccagggagcagggtgagtgctgggctctgtggtgcatcagaggccatagctggctgaggcctgctgtgtcttccctgggcaaggaacagaggcaaattcagtcctctttgtagcagggggtcatcacagagggggctggggttgaagctggacagtaggaagcacttcctgcagtgaagtgtgggaacacagaagcagtagttgtagacacctcttggaagggttcttaaaaacagcaaagccttggttttcctgggcaaagtaaaaggtctgctaagataatatgaaaccttagctctctgtctgcctgatgtgggaggtttttgcattttacagggagagagaacaaagttgggaataggggaatgattctcaggggaaggctgggtgtgggacaggggtcagcaacggcagcccatgggtcaaatctggatgctgcctgcttttgtaaatgaagttttactggggcgcccccacacctgctggcttgcatcctccctgtgctgctgtcctgctgcagtggcagagtggagtagttgtagcagaggctgcatggcctgcgaagcctgaaatatttactctccggccatttacagagtaagtttgccagccaggtgtggtggtgcacacctataatcccagcacttcaggaggccaaggcagggggatcacttggggccaggagttcgagaccagccagggcaacatagtgagatcctgaatctacaaaaaacaaaaagaaaatgagccaggcaaaatggcacacactgaatagtggcctgtggtcccagctactggagaggctgaggtgggaggatcacttgagcccaggaggttgaggctgcagtgagccatgattgtgccactgcatgccagcctgagtgacagagtgaggcccggtctcacaaaaacaaacataaaaacccaacagaataagtttgccaacctgagtacaggaagacccgtaggagtagttaaattttaactttaaagaaaatttgtctcacctaagaaagaacgaaggtcggtaggctcaatgagacttaagtaaaactagcgccaccgaggtcttgcttcctcctctctccttgtcccttccccatgcagccatcgcgctcctcaaggaccaggagccgggggccttcatcatccgcgacagtcactccttccgaggcgcgtacgggctggccatgaaggtgtcttcgccacctccaaccatcatgcagcagaataaaaaaggtaacctcatctcccagaatggggctcaggaccaggtgagctttacagtcgctaaacctggaggtgctggagggacccagggtgctgggcaggaccttaactcccatcaggctcttcggaagagggtgtcttgggcttggtgatggttgaggtcagagattgggaaagcaggacgattgggtgcctgccatgtgtttcctgaggggtgggagagcagcagtgggctctgcagtccatggggctccagccacgttctctcttcagtcatttctcccatcttggccccgcacactgcggaagttttgaagcagtcttgggaggtggtgggaggaagccatgggcagggactgagccttatttctttctctttgtcccaggagacatgacccatgagctggtcaggcattttctgatagagactggccccagaggagtcaagctcaagggctgccccaatgagccaaacttcggtgagctgtccccctgcccccatctctacagtctggcctgagtcttggtcctgtcctgggttcctccaggggtctgaccccaagttctttctgacaggctctgccagtcacccttgtcataaattcagcagagaaaatgaatgaaagcttctctccctccgcagtgcggctcctaactctgccaaactgcagtctgtgtttgtccgacccagctgggacttgttatcattataactggagtaacaatggtaaaatcagctgccttaattgaccacctaccatgtgaatgtcacagtctcagcaccttctatcacatctggcctcacaaccatcctgtttggtaggggtcatcctccctaatagggaggaattgacacatgaaaaaacgagagtcatcaaagttacatttacctgagaaccaacaggtgagaagtgactgagctgggattggatcccacaattctctgatccttctgccctgttctcagaggagccccagtaactggggtgcattaggagcgatgttaggaggaactttctgcaaaggaaagttgttaggtaactttatgactgcgagagtgaaccttgggaatcttctctgttggatcttgttcaacaagagggtgtgaattttcagctttggtggtgggttgaggtagaggtaataaagaagtggaagattgtgtgtatcggtgtaagggtagaggtggaggtttcccttctggcttccagtatcactgcccatgacatgccgtctgcctccctacaggatcgctgtctgccctggtctaccagcactccatcatcccattggccctgccttgcaagctggtcattccaaaccgaggtaggaacgtgagactcctggctcaccacccacacccttgagctggcccttgtcatgtcttgatcctgccagccactccggacatgggccagggctggaggacacatgtcattttgccagtctggagaaactcaaaactactctccttttcttcctattaaaaaagaagaaaaaatttatgaaaaagcttgactccaggagcatacataaatggacttgccagattgttcaggaaaactctccgtatgaagaaattcatatggaatcctcagaccacgtcgtcccagggatgacaggagacagaagtaggggacaggagacatgtcctggaggatgagatgggcatctggggaagagagtggggaggcagactgaggtgttgaggggttggtctggatggagaggagagagcagcctcaggaaagagaaggcggtgcctaaatgtcgccagactttctaatctgtgtgctgggagggtgttccctgactaaggggatgctgagctgttagggaagagcaagtcctgttttgattgtgggaagttggaatggactccaagagcatgaggacatgcaggatgagaatttgagtgagacggcagggctagggaaggagtgtttagcttctctcatggaggcgcatcagccctggagcgtggcaggtgggcacctagaactcctcccagcataggcctctactgcccagccctcagcaacacagggcccacctgagggtcactggcctcacccgcagtgcaaggtctcggaacggtctgggctgccttctccccactctgtctgttcaacaataggaccttcagaagcgctcctaggctgtggccctaggatttttttctagtctttcttggagctcctggggctatgcccacacataacaccgccagtatttttggacaatttctacttatccaattcagttcattgaattattaatggtaatggaccaatattattagcttataagttcaaatacaacttaaatagcactattaaccaatgacacaattcagacatgaattgaattatattcctatggaattcaccattgtagttcagcaattaaaaaactgtttaatatttagattgtataaacctgttgttttcaaagtatgggcctagaccggcagtgtcagcatatcccagggacttgttaaaaaatgcaaatattggctgggcatggtggttcatgcctataatttcagaattttgggaggctgaggtggaaggattgctcgaagtgaggcattcaagaccagcctgtagaatatcagaagaccctgtttttacaaaacagtaaaaaaattatccaggcatggtggctcatgcctgtagtcccagctacgctggaggctaatgtgggataatctgctagagcatgggagtttgaggctgcagtgagctgtgatcatgccactgcactccagcctgggtgacagagcaggattctgtttcaaaaaaaaaaaaaaaattatgtaccatgtacaatgtgatgttttgataaatgcatacattgtgggttacatcaatatgctaatatatccatcactcaattcttattaatattgaaattagagttatgctggatcaatggtttaatgaattaggggaattaggggatttattgacctacacaaagatatatcaatgcaaaacaataacagcaatgccaattgtcacttgaaggcttgctttatgttaagcactggctaagctgtacatggagtcgctcaaaaacccagtgacgtgggtaccatgatcatcgtctttgttttatagatacttagtaagtgctggggtgagggtttgagcccagttctgctggactccagagctcacaaccagtgtgctggctgcttagagcaatcatcaaacgttcagactgagcctaactcagggctgactgccagggtctggtatgaaaagcagcgttccttctgccaaagagttgcagagctcaccttcagcccagccaaacttgtgcttctttccagctctagggttttaattcctactgaatttttgtcttagaccccacagatgaatcgaaagatagctccggccctgccaactcaactgcagacctgctgaaacaaggggcaggtgagtggtcacctgaaactgtacccatgcccaggcctctctttctgccttcctgccctgacccctcctgcacgtgcaggctggaggtctctccaggcccaaatgtctctgggaagatcacatttctatgtgcagatgccttggctcaaggctagcctgaaatttatctgctaccttctccctgaagaatggatctgggttaatgtcctcacccacgccagctcccatgactcccccttgggttggtttcttccagcctgcaatgtgctcttcgtcaactctgtggacatggagtcactcactgggccacaggccatctctaaagccacatctgagacgttggctgcagaccccacgccagctgccaccatcgttcacttcaaagtctctgcccagggaatcactctgactgacaaccagagaaagtaagactcccctgcctgctcctcggtggggttctccttcctgtgactcatctattcatccgtgtacccacacatttaccacttgattgattccttgcacccaactgctcatctaccttctcatccatctatcttgcatctacctcccatctacccagctacttatccatccatccatccatgcacccatccatgcacccatccatgcacccatccatccatccatccatccatccatgcacctatccatccatccatccatccatccatccatccatccatgcatccatccatgcacctatccatccatccatccatgcatccatccatgcatccatccatccatccatccatccatccatgcatccatccatccatccatccatccatccatccatccatccatgcatccatccatccatccatccatccatccatccatccatgcatccatccatccatccatccatccatgcatccatccatccatccatccatccatccatgcatccatccatgcacctatccatccatccatccatgcatccatccatccatccatccatccatgcatccatccatccatccatccatccatccatccatgcatccatccatccatccatccatccatccatccatgcctccatccctgcatttattcatccctcatctatcccttaccacccgtttttcccttcatccatctgtatctccattcatctatccatccacccattcatccatccttctatgagaatttgccagcattgggtatacggctgtaaatacaactgataaaaaggacctgctttctaggagcagagcccgtccacttggactctctcctaacagtgtccctggcctctttgcttcttcttccagcccctccccacatttcctattcctcagtgccagtttcttccttccccagcccctagcatttgggatgattctatggcacatctgtctctgtacattgcttgggtcaccagtgtcaacagctcaggccatcttgctcataagagagaagttgtgtggacctgcgatagccacagatggtggaaaggtggcctgacctgctggtggaaggaggggaaaagcagccccttcagcactcattctctgtttatctgatgtctgtgctgcaggctctttttcagacgccactaccctctcaacactgtcaccttctgtgacctggatccacaggaaagaaagtaagtctcttgtacacagcttctctcccacacagctttctaacactgacgtctgtgtgggtgcatgcatgtgcatgtgtgtgtgtgtgtgtgtgcatgtgcatacattctccattcagctggaaggtctgcccatgtgtgagtaatcgtgttgggcatcttttgagtctttcccactatagatatggagaccctcccagggactcagtgcccactgctaccccctctgccatgccctgaccttgaatctgcttctcctctccatgatggggagagcccctcaggaggcaggctgcagtgttctctcgaccttgaatgcatctgtgtgatcttgggcagctcctgtccctggggaatgggggaatgggggaatgaggggggaatggggggcagctcctctccccagaccttcctgcagagggtctgggcatgggtggggctgggctctagggagaaagtacgatgatttaccctgagcccactttctctccacaggtggatgaaaacagagggtggtgcccctgctaagtaagtgtgacttcttacccctgcccagcaggctggcctttgtacttcacagtgagggaagcacggggcacatttagaaaccagggctgggggtagggaaagagcagcaaaaacctttgtgccaaggtcactcagcttccgagtgaagcttgaccaggcttccaggccttttgccttgtcctgcctcgaggccagaggcccagcgtctggtccagctgccttcactctcccagggttagaagcagcagggatggcaggaagtggacagaaaacagtcttattagaagcaatggaaatgggtcagagattgcttacatgatcttttctgccccaattctagctgcctttatttctgctcttgcttttttggtgggctttcctgtgagtcttgtggccgagcaaatcagccttatcagaatgtgggagcccagaaagtctgaattctggggatggccctgggaccttcgggtggattcctccatccagcagacatgtcctaggggcctccaagggactcagatcctgcctgggtctctgaccctgccctcaggaggcccattggcacagcagataagacagatgtctaaatagcactaagatgcttctgtgattttcaaactgtattccaaggatcctagcatccttggattgtacctgatgtacagaagagagggaaagctctgctgctccttgcagttgtctatcagcagtaactagggttttttcacaatcacaaaaccaaacaaaatataggcataacctggggtctgaagctgacatgagactatcaccatgatctgtcatctacttttcactttgtcaggattattccaacagccctattatcctcactgattgactttataataggtaaatgtcgtgcttttggattgctgtttatagctgtaaaatactgctttcacctttatatatgcagacttcatataaggttgctttagaaaaacaaaacgttcagtgttaaaaaaatgacagttgcaagggagggagaggcagcaagagagttcagcttacgtctggggagctcatgcaggagaacacatcagcacctcagagaggtggaaagagcagatatttaaggacgggtcttcaaagacaggttcaatttggacaggtcaaaatgagaatgggagtaggaggggctatttcaggggaggggcctcatggccaccagcctgcaagctccccaagggaagggccatgtctgacacatggggaggtggtatatatttgttgagtgaagaaatgagagaatggaggctggaagagcagaggcaggaggaggctagtgagaatgcctcagtccgaatgaatggactgactagtctatcacatggtcagtgatggtagcttaggagaggccatgtgggatggtggggttcagccttgtccaggcttcatagggtcatcagtgctttgagttcctgcatttcccgtgtctctgctggccaaggcagcaggctggaacttcctgtttgaaggggcttgtgctcactcaccacagggccctgcgagggaagaaggtcagggacagaagggaactgggcccccaagcctggaaatccctcttttcctccttcaggagctggttttgagttgagcctcctgctgaagaagctttgatgggtggggcagaggccacagggagaggccaagcagggcagtgggctaacagggaatcatgacagggacgaggtgaggccagccagggatctcatgtgcaaaattcaaggagatgttagatcttgggatcttgcaagcgcttcctcctgcccttgcgggctgaggcttcttgcctggatctattccttgtggcagatgacaggactgggctattgcgggagcctggaagccacagctgaaagaaatatcaggggagggcaggctcggtgctccagtcaggtgcagttgccgggtctccatcctggtagacacccgcagccagggctggcatgcttcctccctctgccaggatcacccccacccctgctcatggtctgagccagctgggaaagggaggtgctgggggatgccctgtggaccccagctcccccaccacctgggcattaccccaggcctttggccctgttgctcctggcccctgaaacaagactggaggagcagagctgtaggaaatgctggattatgtgtgtgtgtgtgtgtgtgtgtgtggtgtgtgtatatgttgtgtttgcgtgttgtgtgtggtgtgtatatgttgtgtatgtgtgtggtctgtatatgtatgtatgcatggtttgtgtgtgtgtggtgtatgtgtgtgtggtggtgtgtggtgtgtatgtgtggtggtatgtgtggtgtgtgcagtggtgtgtgtgtggtgtatgcatgtggtgatgtgtgtgatggtgtgtatgtgtgtggtgatatgtgtgttgtgtgtgtgtgatgtgtgtgggtgtgatggtgtgtatgtgtgtggtgtgtgtggtgtgtggtggtgtgtgttgtgtgtgtggtgtgtgtggtggtgtgtgtggtgtgtggtggtgtgtgtggtgtgtgtggtgtgtgtggtgtgtgtggtggtgtgtgtggtgtgtgtgtggtgtgtgtggtgtgtgtggtggtgtgtgtgatggtgtgtatgtgtgtggtgcatgtgtgtggtggtttgtacacacaggcacacagggaccagcagaatccccctttgctaacttcagctgccgtggtcctgcggtagggagaggggttttcataggaatctccagctgtcctcatttccccatctcgctctaattagcaacatgctggctgggaggggacctgagctcacattctgttctctgccctcatatttttaactctgttttgcgaagagaatgctgggtcactccagtcctgcgggtgggggtggggaacgggtgtggggtccaccttcccttttattttctggcttccaaggttcttgagcccaggaagaataagtgtgtgtgtgtggaggggtgtgagctacttgacctttgtctccctgaccttgtggtgtctgaggaggctgagccgtttgcaggcagacagcactttcctgattggcatatgtgttgtgtgtaagaacagtcagtaggggtagggctgggatgggcggggagaggcctgtctaggaatgttcccattttattttggtctcctccccacccctcactatccagccttgtcaatcctctgcagctcccctcgcaccccttcaaaggggatttctgcccacccttaaacaaggtgggacactgtctctaggacttggcttgtggtcaggggagtgcacagaggattctcttctgcacctctctgagtccctgatgctgaggcctgctggagggatggggaagagaggttggcctgagaccagcttgctcacctgggctgctgtccacctcctggggttccacttgcccttccctcatgcccgttgccctctcccgcctgcaggctcttcggcttcgtggcccggaagcagggcagcaccacggacaacgcctgccacctctttgctgagcttgaccccaaccagccggcctctgccatcgtcaacttcgtctccaaggtcatgctgaatgccggccaaaagagatgaaccctgccccttgcccagggccagtgccatggggaaggggcttgtggggaggggacccatgaatcctgaccactcttgaacccagaaggaggactttgggccaatttcggaggagagaagaaagtgcaacgtggggagagggaagtgaattgcagaggggagggggaaaagagagagagagagagagagagagagagagagaaagatggaggagaagaacttggattcccctgggtagatggaaactgcaaaaacccaaagcctccaaaactaaccaggtccacctaacaccccctccctcccctaagaagatggatgtcctcaaaagagaaggaacaaacctccttgggaatccacattttttgggggaatggaaaagctctgtctccctaactcaactgctttgcaaggggaaatcaagctgggagaatctttttctggccacctgtggggtaggttgtcaaaccaaacagagccaccgtgggacatcaagtggaagaacttgtttgcttgaaagtatctcagacccaaggcacctcaggtctctttgctgtgcctccactatattgtcgtgtgggtgtgtgtctgcacccacatcctcacacattgatctagatctgcctttatccactcgaattataaacagctcggcttgtccttgtcccatgtgtttgtagacacacatgcatactgtccaaagattagggttggtggtggcagtgcagcaggggagggacaaacaaccaagctatgggtgacagaggctctctcctggtgcctgcacctgcactctagtgaccctgggtgccgccagacccttctcttctacaaagaccccagcaggagtgggagggtctgcaatggcatcgccctgtcctgccttggccagaagcctggagctttggtttgaggaggtagagatatgtgtatccataggaagagatctgtcagaacaggcagctgttgagctcggggtgtcttccccaaggcatgtggctcagcagcaagaaaggcaagttgctcctgctggggccctggactctgccttagctcccacctctcagccttgttattgggtttcatgcccctggaccagccttatctcagacctgcttacctgcatgatgcctttttgggggctggggattgagtcttgctgctctgcccagccctgttctattctgcagggtccctgtgttggaattctccctggggaacctactttctgctcagtgaggctccggccagaaacctggagtccttatcctcccctctgtaagtgttttagggtctggcttttgcaggcaccctctgacctcagcagagctcctgggcctgctgcctgcacaccacatcgcctacctacaatgccaaagcctcactgtcaccctttctgccttggtttccctagctgagccacgctgcccatgcagcagagggcagaaggcttgcacttgggccaaagggcctaaggtccactggacagttgggaaaacacctgaccaccatttaaggactctaagccagaatggaaaattcaccaggactccattcttaagcctatgcgagtcccctagagagaggcattgtactgatatataaatattatataatatatacatgagacatactgacagaatctgtaagctaataaaatgtaagaaaaggttaaaaaaagaataggtaaattgacaagaagtatttattgtttttccatattgctttattgccttccttggggataaaccaattcctatccttttttatatgtgtaagtaaagcctgaagtgtagggggcctttgttcttgaagcagccagggtctccttgccctggccttggccttccctagactgtgtggggctcagcattgggaggggttgcacatgtcccagcctttggcccccttacttttcagcaagccaggggcccagcagtcagctcccaggatgtgtggggagctgtccctgactctgcaggcctgagcgagtgtgtgagcatgcggggacatgggtgtgtatggcacacataggtgcgtgtgtgtcttttgtattttttctcctccaaggagctgtgtcagtgtggacgttctgtttcagggagttggaaaggagggtgtctgcagaaggtggagagcaggggcagaggccccactggccaccccctgcttcccagagtgaaaccttgtgcctggtgaccaaagtccctccaaagtgctcttccttctgggttattcaagccaaatatctgggtttccccctctcctcattccctagcaaaccccaattatcttccaagataggagatatttcccatccccttcctttgtaaatatctcatctcccactggagagcccaggagcctattcctggcatggatgttctgtccacacttgaggctgggcggtgtatcagacccttcaagcagcctggctggggcccaggactgagtctggggtcagctttcacggtcgcttttcccttcctcaccacccaccacagcccaccttgcatgcatggccagcccctccactccagcctgagccatgtgtgcccctgcgggaggacccattcatgccagaaagctggtaactccctcccagcatccctgcggaaggagtcagtttctgagagtgtgacttttcaaggcgaatgatggggaagggttccccagtccccacagtggccccacctctgggccctgcaccagagcccttctgtgtcacggcgggctgtgcacccatgcacacacctacgcacacacaacactccgcactgcagtatattcttgccaaagatttcctttaaaagcaagcacttttactaattattattttgtaaatgtttatcttcttctgtcttctccctccctgaatctattttactgttgtttattgttgaatctgtgtgtcagccaggagagcgctgtctggccttgaacatgggctgggatgggaaagggtctgggagaagatgggcaacaaagagccagggagtcatggacatcgcagcgacgcagaccccagcaggttcagtcccgtgctgccaccagctgtccagctgggtgtctggagggaagagggcagaggagggtcatgtcccttcagctgggggaggggcccagtgagctccacgtggctttttcccaaagggagcaagagggaaggattgggcgagaaaacaatggagaggggacctgcgaaggaaaacagggaggaagtgagcggtttgatcagcctgctatcacggtgttctggctctcttatttagccaggcgcttaagggacagatacatcacatcctaagtttgggaaaggcctttgacccatgtcatctgagcgtctcctccagtagctctgaaagctgtggacaccaatggccaggattccttctcccctggtttttgaggatccctgggtcttctgagactggccaggagagggatggtggggccagtggttgtgtgaaagcaggaggggcagccctcctggacaagtgtgatccccctataaacggctctcaggaggttagtgagtaggagattctgccttgttctgatgagcctgtgcaggggctccaggggagcatgctgtccagggggcacagaagggtggtgagtgtgatcaaatctagtctcactcccactttttagtctcactcctacttttgtccaccacccctgcctcctggatcttctcccactttttttttcagctttaggacctggggagatcctgtgagtcaaggcagacacccaatcctgcccccacactcggggtcctccaagaggttggggggcagagtcccagagcagccctttaccccaggtccaggccctggaatcctgagactcgcgtttccttggccagtggtaacacaggacgtgtgtgcgcatgtgcaagtgtggatgtatgtgtgtgcgtgtgttttgctcatttctttagggaacttgggagtcggggttggaggtgctgggcaatggaacttcaaattcaatgtcgcccagcagtgaggggagtcgggaggtgaggcctgtaggccaaccaattggtggagtctcagcgatagcccaggtgagaagtggttcacccagaggggcagggtgggggcctcgggcagatctgtccctcttggcacctctgtcctcaaatgtccaaaatgttggaggacctctgttcatatcccacgcctgggctcttgccagcagtggagttactgtagagggatgtcccaagcttgttttccaatcagtgttaagctgtttgaaactctcctgtgtctgtgttttgtttgtgcgtgtgtgtgagagcacatcagtgtgtgcaggctgtgtttccccatttctctcctcccttcagacccatcattgagaacaaatgtaagaaatcccttcccaccaccctccctgcctcccaggccctctgcgggggaaacaagatcacccagcatccttccccaccccagctgtgtatttatatagatggaaatatactttatattttgtatcatcgtgcctatagccgctgccaccgtgtataaatcctggtgtatgctccttatcctggacatgaatgtattgtacactgacgcgtccccactcctgtacagctgctttgtttctttgcaatgcattgtatggctttataaatgataaagttaaagaaaactctg

SEQ ID NO: 15 - DNA, 5462 bp, Homo sapiens
acatcaccacggcggcagccctttaaacccctcacccagccagcgccccatcctgtctgtccgaacccagacacaagtcttcactccttcctgcgagccctgaggaagccttgtgagtgcattggctggggcttggagggaagttgggctggagctggacaggagcagtgggtgcatttcaggcaggctctcctgaggtcccaggcgccagctccagctccctggctagggaaacccaccctctcagtcagcatgggggcccaagctccaggcagggtgggctggatcactagcgtcctggatctctctcagactgggcagccccgggctcattgaaatgccccggatgacttggctagtgcagaggaattgatggaaaccaccggggtgagagggaggctccccatctcagccagccacatccacaaggtgtgtgtaagggtgcaggcgccggccggttaggccaaggctctactgtctgttgcccctccaggagaacttccaaggaggtgaggagtgtgtgaacgcacctgtgttggagcacggtgtcccactctggcgggtccccagggcctgagcagcagcgatagccctgtgacaatgtgaagggccacagaactcttgtattccagtcaggggcaaagagtggagacggaaggcctgtccttctgacaagcagccccttccactgtctgacagtgggaggtcacccccactgtagcagaggggtggggggcgggtactgccaaggaggagctttggagtgataggcggggcaggcctgggacccttggtctttcccaaagggtggttccctttcgaagttgctattccaaaggtagcagtgaggatggcacacatttatgtagccaggccactcctgtttgtccgtggagtggagaggagccaccctcctgccctctcagaggtccaggtgtgctcactcctatttgggaagagagaaggggcacagcagccctgcaggggcccctggctctgctcgtgtttctgggcttctgctggtagggggtgccaccttcccgtttgaccctggactttctttctccactgcccactttcacccactgggcagctcaggggaggggtcctggcaggagccacagggcaggagggtccatgcctgtccatgctgtcctgggagtgtcttgagatgcccctgggggggccgccctgtaatcatcctcctctccccctccccactggctcgaaggcaggactcgggaggcttcatcagaggactctaaaggatttctggggattctccacttttcgaccctgacccaggaggaggaaggggaaggatggtggtgctgggtgggagtggggatggtgtgtgcttcatccccctctgaccgaaatcctaatcttgtctctagatctgggggctgcagcgttgtgtacctgtcacccttagccttgctgctttgacctgtattgtctgttctgaccctcctgagactggaagctgggggtaggggacacactctccttccatcctgttcctcaggagcccagcaggggtgcagaaggggaaggcagacatgagggcaggtggagtgggggtagaagcagggccagagacagaaggtggatgcctgtctgggatggtggtgcaaaggctgagacagaggctggggtggatggaagccaggatgcagggctaccaaaatcacctggtcccagctgacttgggggtttggaccacagttctttgtgcaggagtccttgggtggttggggagcgggggtgggacacacagggtgaagggagggattggctgtttgtagctgaacagcagaacagagcactctgcctttggggtctctggcatcactggcagggagaggggtggctgggccaggagcccacctcatccccagtgctcagagaactgggtcctcagaagtggtcctgcccccactttacacataaggaaacagacgcaaggaggagagggatgcccaatgacgggcacttcgatgagtccgtgtgaactctgttccgtgtgagctgctgcgcgctcagggaatgattgtgagaagcgggtggaggctggagtgggcagcaaagaactgacattttgaggtcagtttttcactccttggtcaagggcaggctctctccctggtcattaccaggagcctggctccgggcagcaaagaactgacatttcgaggagctctgctaagggccaggcagtatgtgagggagttcacagacaccgtcccattttcacagccctctgaggttggtaacataacccccacttcacagatgaggaactccagcccagaaagcctgtcagccctgagaaaggaagggcagggcatcgggctgggcagctggcctgggaccagtggggtgtgatagtgttggctctgcttcccgcgggtggggtgccagtggggaggggtctcaccagagagggagccgggggagtgcgctcctgcgtccatcctcagaccagcgtgtccctcccaacctctgacccctctgaggccaggggatgggttcggcttcctttggtacctcttttggaagtctcttcagacaaacactggagagaaggcacagcaccctagggtgacatcagtggacaggtcagtttcctgttcctgttcccagccacccctgtctgtctgcccagggacctacctgcctggcccactcctgctgccacccctctccatgagtgggactcctgagcagtgccaggcccaggccctcagggtggcagttgctggatggggccaggcttcccattccctggcaggcagactcttggctctggaagatccctgggggactctgacttcttggttactcaggctactccgtaagggtagccttacgagagcgtaagggcatgaggggaagtcgatgggtagaccaggtgtctctgatttctctgaggaaatgcagcttctttgccaagaactcttgggctttggtggcttcgtcgcccttgcctggggtgggcgagttttagtctcttcagctgcagaccagaagctgagctgacctgaaaagagctggagttctggagttcgggcttccaggccagggcctgcttctgggtgagagtgggaggtaatggttgcttgaggcagaggcagtaaaccctcacacccgcagctggacaaaggcaccagctggctgtattctgtgggggcaatgtggcttctggaaggtctctccagtggctctgtagctggtcttggcaaagaatgttctagaccaagggttgtcaaactacagctcatgggccaaatccagcctgctgtctgcttttgtaagtaaagttttattggaacaaagccatgttcatttgttacatattgtctatggctgctttcacactgcaacagcagagaccatgtgtcctgcaaagcctaaaatatgttctgtcttatcctttacaaaaacagtttactgacccctgctctagacctccaaagacctggtatcctctttcctggtgttcaagttcagagaggtgtctggagtaggggctgagcctggcctggatgggcagtgctgtgacaagtgtctaggatggccgggtatcctgcacagagctagaaggctgcctggcacgggtgaaagcagagctgctccctgaccctctgcccctccctcctccaccctggcctgctttagctttccccagacatggccaacaagggtccttcctatggcatgagccgcgaagtgcagtccaaaatcgagaagaagtatgacgaggagctggaggagcggctggtggagtggatcatagtgcagtgtggccctgatgtgggccgcccagaccgtgggcgcttgggcttccaggtctggctgaagaatggcgtggtgagtggcaccctgggctagggcgctggggggctggggtgtgccaccctgtgagtcctgggccaatccctgagctgactgctaagctgcgtcctatgccctatgcctggtagattctgagcaagctggtgaacagcctgtaccctgatggctccaagccggtgaaggtgcccgagaacccaccctccatggtcttcaagcagatggagcaggtggctcagttcctgaaggcggctgaggactatggggtcatcaagactgacatgttccagactgttgacctctttgaaggtagagaggaagaggctgggggaggaggtgggcaggaggacagggtgctgggacagggagagggaatgaccagaatatgccacaactaggggtgtgcttgcccgcacacagcagggatgggatatgccgagaataacacgccacgctcacagggcccactgagaggcctcccttgaattggggacaactcttggccctggtttggccatttttttgtgagagacgggggcaggccctggcttggagtcttgtttatacgttcttgatgttcatctcctctctcctgtcttctcacaggcaaagacatggcagcagtgcagaggaccctgatggctttgggcagcttggcagtgaccaagaatgatgggcactaccgtggagatcccaactggtttatgaagtatgtggcccccagggagcttgggtctccgcatggggtgggaggtggcttgttctaaggagcttgcgggaaggattaggggaagcagatagccaagaaaggataaagtgagggtctgggatggggaataatgggtccttaatactccttgacccctccctttccaccctcctgcgctcagtctccctagcctatgaggcaagctagattagggaaaaaaagtgcaacaggaaggcaatgggattgggctaggacgtaacagagggatcagaaaacgggtggaaaacacacagttctaccaagtctttatcctggttcctcctcttctaggaaagcgcaggagcataagagggaattcacagagagccagctgcaggagggaaagcatgtcattggccttcagatgggcagcaacagaggggcctcccaggccggcatgacaggctacggacgacctcggcagatcatcagttagagcggagagggctagccctgagcccggccctcccccagctccttggctgcagccatcccgcttagcctgcctcacccacacccgtgtggtaccttcagccctggccaagctttgaggctctgtcactgagcaatggtaactgcacctgggcagctcctccctgtgcccccagcctcagcccaacttcttacccgaaagcatcactgccttggcccctccctcccggctgcccccatcacctctactgtctcctccctgggctaagcaggggagaagcgggctgggggtagcctggatgtgggccaagtccactgtcctccttggcggcaaaagcccattgaagaagaaccagcccagcctgccccctatcttgtcctggaatatttttggggttggaactcaaaaaaaaaaaaaaaaaatcaa

SEQ ID NO: 16 - DNA, 8541 bp, Homo sapiens
gtgggcggtagaaagcgagcagccacccagctccccgccaccgccatggtccccgacaccgcctgcgttcttctgctcaccctggctgccctcggcgcgtccggacagggccagagcccgttgggtaagccgcgttagcacccgcgccgtgcccacggccccacaacggactgtaggacccgtgagaggcccgggatccaggctgtttggggctcacggactgttcgtaggggacgtgccgggcgcagaaagcaggtggcgggaccgagactagaggagcgcagtggggcctcggaggtccgggttcgctgcaacggtgggagttggtggtgggattccccggccccatgacgcctcaccaggtcccctgccgccgcaggctcagacctgggcccgcagatgcttcgggaactgcaggaaaccaacgcggcgctgcaggacgtgcgggagctgctgcggcagcaggtgcggggcccgggtgcggggcagggagtgccagggaacggaagggggtctcagttcccagcgaggagagaggaagtacccgagaaggtggagaggagatggggagggaagggggtcggcgggtagggagtccttggcgaaaagaggctgtagaaagggaccccggggtagagagaggggagacccgagggatgaggagaggttgggaccccgctgattccatcccacccctgcaggtcagggagatcacgttcctgaaaaacacggtgatggagtgtgacgcgtgcggtgagcgcggcggggcggtcgggagagagaagagacgggagacagagacacagagacagagacagagagccagggaaagctggggaggaaaagagacggaaggagatggaggctgacggagaggtggacggacgaacgggaatgggatggggtgtgtagaaacagagacaaaaagagacagaagcggtgagagagttttggggaagtgagagacgccacggggcagaaaagcgggacagagactcagagaagagaccggggagaccccgcggtcagagcgcgcagcctctggggcgggatcgcggacagcgcaggatttcgggccgccccggggcggggggtgggggggaaggggaagcctccagccccggggcgtggccatgataggctctgcccccgggcgagccaccgatcagccccgccgcttctcccccctcccccccgcagggatgcagcagtcagtacgcaccggcctacccagcgtgcggcccctgctccactgcgcgcccggcttctgcttccccggcgtggcctgcatccagacggagagcggcgcgcgctgcggcccctgccccgcgggcttcacgggcaacggctcgcactgcaccgacgtcaacgaggtgcgctagccccgacactccaccgccctgacgactccctctaccgccccccaatctctcgccgcccgggagaccccttcctccactgggagtgttcgccccgaagagcctctcacctccgggggcgcacggccagactacctccttaccgcggggggacgcccaacccaaggaccatccccgtcaccacccgggacgcccgcccccacaaccccctacatagctagtgacgcccgccccgacgactccctcaccgccaggggtggtccgccccagctaccctcctcgccgcaggggatcgccagtcccaacgacccttccacagccagggaacgcacgcccagaccccccgccaccgccgggcacgcacgccccgacgacccctgcccccctctgctggggatgcccgccctcatccttcctcccctcgcccatgagggaacagctctcctctcctctcccggttgcgcccttgccgtcatcaaggcaaagtcgtgcctgacccctgcgacaattgcttccatctcagagctccaagcactggcatatggcccttgaactttccacatccgagacactacgaggtgcggcccccagggcccagctcgaagccctctgaccctctgtggcccctcctcccccagtgcaacgcccacccctgcttcccccgagtccgctgtatcaacaccagcccggggttccgctgcgaggcttgcccgccggggtacagcggccccacccaccagggcgtggggctggctttcgccaaggccaacaagcaggtgagaggtgtgggggccccatttttggagcagaagggaagggggcgtccattttgtttaccagtaaactcctcttccagcctccttccagcgggaggggtggggagaggaggggtccgctgcgccagggctgatcggtttggggcaggatggaggggagaggcaggatgcggaggaagtgtggaggaggtgggaggtccggaggtgtctgcgtggggtggtgacctctgagttcccctcccctaggtttgcacggacatcaacgagtgtgagaccgggcaacataactgcgtccccaactccgtgtgcatcaacacccgggtaaggcccgctggggaggaagaaaggatcgcgggaggtggggcgagcggcgggcggcctgcgctgacctccggcggctccggcgcagggctccttccagtgcggcccgtgccagcccggcttcgtgggcgaccaggcgtccggctgccagcggcgcgcacagcgcttctgccccgacggctcgcccagcgagtgccacgagcatgcagactgcgtcctagagcgcgatggctcgcggtcgtgcgtggtgagtgcgggcgggctgggcttgaggcggggttgggtggcggccactccagggcacccacttacactctcccacagtgtgccgttggctgggccggcaacgggatcctctgtggtcgcgacactgacctagacggcttcccggacgagaagctgcgctgcccggagcgccagtgccgtaaggtgggtgggggcggagcggggcgggcttgggcaggagggagggcgggacttcatgaccgcgcccctcacaccttctgtgcccgcccccaggacaactgcgtgactgtgcccaactcagggcaggaggatgtggaccgcgatggcatcggagacgcctgcgatccggatgccgacggggacggggtccccaatgaaaaggtagatctacggctcggcacggtggttcactcctgtaatcccagcactttgggaggccgaggcgggcggatcacgaggtcaagagatggagaccatcctggccatcatggtgaaacccctcctctactaaaaatacaaaaattagcggggcgtggtggtgcacgcctgtaatcccagctactcaggaggctgaggcaggagaatcgcttgaacccgggaggcggaggttgcagtcagccgagatcgcgccactgcactccagcctagcgacagagcaagactctgtctcaaaaaaaagaaagaaagaaagaaagaaagaaagaaagaaagaaagaaagaaagaaagagaaaaagaaaaagaaaaaagaaaagacagagctgtgagcggggcctagggaagtgggatggggcgtggcttggatgaggggcgtggcctccgtggtctaggaggggcgaaaggttccttgaggaggagacgcgtcctcggagatttgggaatctgaggagtgtgacctttgccttctcgacctgatctcacccttaacccaccctgtcatccaggacaactgcccgctggtgcggaacccagaccagcgcaacacggacgaggacaagtggggcgatgcgtgcgacaactgccggtcccagaagaacgacgaccaaaaggacacagaccaggacggccggggcgatgcgtgcgacgacgacatcgacggcgaccgtgagctcgatgggggttggggggcgaggagaggcggcgggcaccgaagggcgggattcggctccggggcggggcttggctggttttggaagccggatggggtaagctggactagggcgccctggaccaaagaccatggtggggcgccagaaaaatgcaagctgggctgcaaggccaggaaaaacgcagggatatttggaagggaaggtggtccctgtgtcaatgccgcaggcaggaattaagaggacaagagattcgagcctggggtttaggacctgggaggtgacaactttacagatggggacataggggctcagggtggcacacacgggcacccagctgagccaccctgggagtgagagcccgtccccctcactagccttcccttggatgggaccattcattcttaaagttcctgtgggccggacggggtggctcatgcctataattccagaactttgggaagctgaggcaggtggatcacgaggtcaggagttcgagaccagactgaccaacatggtgaaactccgtctgtactaaaaatacaaaaatttgctgggcgtggtggcgcacacctgtaatcccagctactcgggaggctgaggcaggagaatcatttgaacccgggaggtggaagttgcagtgagccgagatcatgccactgcactccagcctgagtgacacaatgagactgtctcaaaaaaaaaaaaaaaaaaaaaaaaaaaaagcttccatgaagttgggactctgttccaggccagcctcaggctggctcatcctaatgaagtcattctggcctggtcccaatcttggggctctggtcccgtggatttctgcagggatccgcaaccaggccgacaactgccctagggtacccaactcagaccagaaggacagtgatggcgatggtataggggatgcctgtgacaactgtccccagaagagcaacccggatcaggtgagggcaggccagactccagctgggtaagccctctgggtgaactgcaagttggattacccagcccacagcccagcttagagcattttacactgccagagaaatgacctctcggtccgagcagcctgcggtgggggtttccttggggtcaggaggaccttggctgtgcggctgggttgggtgggaggctttctgatttcctctgtctgattatggacccccgcatgctgccctccgcaggcggatgtggaccacgactttgtgggagatgcttgtgacagcgatcaagaccagtaaggaggccacctggggtgggcgtccgggtagcctttgacaaaacgctctggagagctcattgtctctggatcccacctatccactctagggatggagacggacatcaggactctcgggacaactgtcccacggtgcctaacagtgcccaggaggactcagaccacgatggccagggtgatgcctgcgacgacgacgacgacaatgacggagtccctgacagtcgggacaactgccgcctggtgcctaaccccggccaggaggacgcggacagtacggcgggggcggggcctgcggtgggggcggggccagtgggggctcctggcgcggggtctacggtgggcgggccctgactttagcccaccgaggggtctcccacctctcaggggacggcgtgggcgacgtgtgccaggacgactttgatgcagacaaggtggtagacaagatcgacgtgtgtccggagaacgctgaagtcacgctcaccgacttcagggccttccagacagtcgtgctggacccggagggtgacgcgcagattgaccccaactgggtggtgctcaaccaggtgggagcggggtccacgtggggggtgatgggaccctagaacccccacagtgaggcctatgctgaggacagggtgcctagggctgtcacggccagcctgaggccctcctttctttgaccccatcagggaagggagatcgtgcagacaatgaacagcgacccaggcctggctgtgggtgagaagcggggagcagcgctatcctgccacggagcgggctcagggagaggggccagagaaggggcaggcccgggctgagaatgggcggggccagaagggggctggcccgggctcaggaagggcggggacagaggggcggggttatatgggcgggcccgggaggagaaggcgcggggccagaggaggggcgggctcgggaagggcggggccaagtggaggtggactctggaggggcgtggccaatggtagatggggggcgtggctgagtccgggctctgcgagtgggaatggtgcaggtctgcaggcagatcgggacccagggggcaggtttgggttctgggtgccaggttccgggggctggggctggcgttcggaaaggccactgctctctttccatccctaggttacactgccttcaatggcgtggacttcgagggcacgttccatgtgaacacggtcacggatgacgactatgcgggcttcatctttggctaccaggacagctccagcttctacgtggtcatgtggaagcagatggagcaaacgtattggcaggcgaaccccttccgtgctgtggccgagcctggcatccaactcaaggtgccagggccgtccgtgcctgacctctgcggtcctcatgccctcccatgaccctccgtaaaaccctttacagcccttagagccccccagccccctagcctcatactatggacctcaaagctgtcccagccctcctctgggctcccgcagtccccaaatcctcccagttccttgcacaaattctcaaacattctcagggccccccagtcttcctatggaccctaaaccctctcacacagccctaaacttttccttagtttccaagtccttctgcagagccccccatcctcccagaccctgaatctgtccacggactcccaaatcctctcatgaacctgcagaccactgctgccccctgtgacctatccccaagctgccatttggcccctgaagaaggcttccttgtgggtctctcatccggatccccctggccgcccaccacctgctgctcccaactgtctctccaggaaggtgtctaggggggctccggtggcccacgaggtctctgaccacctttcctgggtattggcaggctgtgaagtcttccacaggccccggggaacagctgcggaacgctctgtggcatacaggagacacagagtcccaggtgcggctgctgtggaaggacccgcgaaacgtgggttggaaggacaagaagtcctatcgttggttcctgcagcaccggccccaagtgggctacatcaggtggggactccaccctctgtggtgggctgggctggggacacacaggcccaggtgggagtgccctggccaggcaggggctgtgtgaccctggtcccctcatctgtacgataggaaagatacagggcagttagaatgagcctatgctggtccaggcgtggtggctcacacctgtaaccccatcactttggaaagccaagatgggaggatcgcttgagcccaggagttcgaggcagcctgggtaacatagtaagaccctgtctctacaaaaaagaaaaaaattaggccaggcgcagtggctcatgcctgtaatcccagtactttgggaggccgaggcgggtggatcacctgaggtccggagtttgagaccagcctggccaacatgttgaaaccccatctctactaaaaatacaaaaattagccaggtgtggtggcggggccctgtcatcccggctactcaggaggctgaggcagaagaatcgcttgaactcgggaagcggaagttgcagtgagtggagatcgtgccattgcactccagcatgggtgacaagagtgagactctgtctcaaaaaaaaaaaaaaatgccaggcatggtggcacgtgcccatggtcccagctactagggaggctgaggtcagttgagtctgggaattaaggtggcagtaattgcaccactgcactccagcctgggtgacagagcgagaccctggccaggacacagcacacagtgtgtatccagctagaaatggggcctcacccagtccctgtttctcagcctccattccatgctgctagcaagcccaggtgctctgtttagcaccaactatgtccagggcccttgatgtccaccacaccaggaaactgaggcccaaggcagaggcctcacttgctcccagtgcagcccagtcaggggtacccatcttccagggctggccactgaagctctgagagggaagggtctggcccaggtcccccaggcctcaccatgtctgaccctcagggtgcgattctatgagggccctgagctggtggccgacagcaacgtggtcttggacacaaccatgcggggtggccgcctgggggtcttctgcttctcccaggagaacatcatctgggccaacctgcgttaccgctgcaatggtgagccgagggccagcgggccgtgggcggggagtctgcacacaggccctgctggccttctcagccctcacccgcctgccctctccctgcagacaccatcccagaggactatgagacccatcagctgcggcaagcctagggaccagggtgaggacccgccggatgacagccaccctcaccgcggctggatgggggctctgcacccagccccaaggggtggccgtcctgagggggaagtgagaagggctcagagaggacaaaataaagtgtgtgtgcaggga

SEQ ID NO: 17 - DNA, 966344 bp, Homo sapiens
agagtgtgtgtgcgtgtgtgtgtgtgtgtgtgcccgcgcgcgtgtgttgtagctctgtcaatccttggattagaaccaatgattgcagcttgtaggagggctgtccagggccagattgtacaatgtgtctcagtgccagagtatgagtggagataattacggagaagtcatactctctcacaccctcggctttcttgttgtgtccttcagcaaaacagtggatttaaatctccttgcacaagcttgagagcaacacaatctatcaggaaagaaagaaagaaaaaaaccgaacctgacaaaaaagaagaaaaagaagaagaaaaaaaatcatgaaaaccatccagccaaaaatgcacaattctatctcttgggcaatcttcacggggctggctgctctgtgtctcttccaaggtaagagcttgctattgatttgccttcggtagacccaggaattgtacagtgtgctttataagatttgcagactccccgagtcggctgtgctgcgctgtttgcaggtggaggagagagcgtttagacagcatggctgggacttcattctcccgactaggctgtgagaatattgatttgattctggctgctaccggaatgggggaatatgtatgtgcataagtaaaatgtgtttggtgctcctgttaggactgtgcttgtgtgcaaggctccctggcttcatgcacattcttgcacacatacacaacggagcacacatgtaagcagggggaaatgacagattcggagggcaacagggttgctaatgtgttgcttatgcgactgggaagaaattacaagaggaaactttaaatatcggccagcgaacttgcaaagcttttaaaaggagcaaaggggaaaatgcaggctagaaagaatcaggtgcttcctgtgaggttctggtcagcgatccagctgcaagggatgagtcaatttgcagcagtgggggacaactgtattagttttaaatgtgttcgggggtgtgtttgtggctggggtcggaggtgtggaagcgaggggagccggggctctgaaattctaaaaagcttttcgaagttgaagggagagaggcaataagagtcgaatgctaattttctgtttatttatcggctgagccgggagccctgggggctgcagttgagtgcaagctttgatgtccccagtgctgtgttctgtgcatttggaatcggcctccaccttgagtccatttgctgcaccgtgcctccccacaccccatcccggctctcacgtctgttcgttccagcaacagaattatccactaatcttcttgctcccacctgccctgtcctttggggtaactagtttgcctcttttatattaaacacagctaaaactcgtaaggatcgagacaagctgagaaactttcccagggtggcccagcagggctccgggaggaggagccctctcttgggaggtgaggctcagtcctatgcagttgtattcccagaggaaagttccctctgacccggtgaaaaacgatggggagtcccaccccctcgccctcttctccccctgcaatatggagttctcctgatctggactgagtcctgagctgtagtcctgctggctcttctccgaggttaggatttagggattgctgctgtcctcttgacataggttgcagtggctgcagtgtggatccacgtaaggtgggcagagagaccaggctggaaggatcaaatgtgtacacccttgactggggctcgatgaagaaggcaaggggtggggacaggagggatctgtgtcgggtgataaggaagtccaaggtggtgaatcttgcagggatgtccatgatgtcgtctgctgcacccaaccccaggaggcatgggcctcaggattccctgctgtcccctaggggctttggtgggtgtttgagtgaagggaatcaacttggaggcatcctcgattgactcctcttatataatatgaagcagtatcagtgtgtgtgtgtgtgcgtgcgtgtgtgtgcacccctgcttgttctgggtgcacaagaatgaagtggggaagctgagttcaggatcgggcagtttcggaaaagcagtttctgtgggggttgacagcaaaaatgaaaactaagcaggcaaggggtagggtgaggggtcagaggtagggagagggaaggtcccaagccctcagtcatttctatctgtcccgagatccatgtctcttctgcctgtaacatcaaactggagacaatgaccaaacttccaccatcaacagccctgctggctgcatgccaggagccccagggccatactgaatttacatataaattagcatacgtgattttttttttcatcagaataaatgcagggaagcataatatttgctcatactttgaatcatctctgaatagatgagtagcaaagtggtggtgccaatttctctaaggtgccatctgactttgtggtcttgttcctaacttggggtaggggtggtggcgacagcactatctcagaccttatcacattctaccgaatccggaatttctcaaaaagaatgatggccttatttgtgctaccctcacccagtcagccctgaacaggcttcagtggtcgtaatagaacaaggttgcccaattttaacgcagaacgacccccaaagacccgcatattgcatgccagtcagatgtggcaaaggtgatgtctgttttctctttcagaggaaggaagctgaagtctgccagctatctcttatcaaacttgcagaattactgaggcagcccaggtcttgcctgcaataatccacccctattgcattgacccagtgggactagttagaatgcagcacacattccaaggcgattttttcttctcctctgtttttgttttaagctggttcttcctagagctgctgcttcctgtgcctcctgcctcttgaaaaggtgtctggtgctaatggcaggttaggaacccctccctgacctgctcctccccacaacccaaccagcaaccaagatccagcttaggtagggaggggggtttctgagggaatcagcactgattagtgacgctgacaggaggggggattagctccctggggctctggccctaagatacaccagggttgattaagtggaggcatctcgttgccgggagcagacgctacagaactggatcaggcgctgtcccttgcagaacacccaccgcccaccttctgccactgagagcctctgaaaggaatggctgcttgtgctgcagcttcctctttctagaaaaccgaccatttctccttcgaaggattattgtttcttttaacaccttcagatttgcttggctaggttcctctcttacctttctcatttcctcacctctcctcacatcccgcatccgcttagcagctagcctgagacacagacagggcagaggagaaggaaaaggtgcctcggcaaagttcacactccccttcgcgcagcacccgggaggtgggcggtgggcgccgttcggctgggcaggccggccaggttcctgccatgcacagtacacacgtggtgccagcagcagcttgagctgggcaatgcttctgatattcaggggtggcagacgagaccatagcaatatctactggcaaagtggaaacatcagcctgggatgatgggaccctgggcctgacataggcattgtgggctcttggaagcatggcagtaaggggagggcgtcagggagcctcatcgaatggaacctgcctgccaggcttggggctgccaacttgaggcaagttcctggcaaggcgtgcacagtggcacaaatgtagctcacctccgccctttgtattaggaggccaccccaccaatggggatggccgtctgagcattcgctcaagcgtgcctggagagtgtctgccctggccggcaggtctcgctgcatgaagaccattcttgaaactgcagctttagttaccaggcacagagcctggtcctggtcctgattcttcccttttttggttcccttaaagccaaatataagcccccagatctcgtcttatcagctgcaatgtacagtccctgacttctgttctttctcagtaacctccttccatagcgctggttttaattcaggcgtcctgcgtagtgtcttcaggtgtgtctcttggttccctgcctgaggtgatagggtctagattgcctcctggcagttccctgggttctgctctctgcctgcgtactgtctgccaggctgatagtggctccttttcttgatgggccaaacaacctggtgttgattttagccaaaacttgtcccttgggatgaagtgagctctctcaacatcccaagaaatggcagaatttctgaatcaatatggggcacatgattctgacgtgtacagaaaacacatgctggagagatttgtaatgctcttgccattcaatcatagtagaggcacactttgggtaggatgaacaggtctgtgatttggcttttttcctagtattttggattcaagctcatgatctgcttctgctcacaaactagaatgctaaagattaacaaacaaacaaacaaaaaacccacattgctctctctcttgctgcagcagagatcctacaaatgcttcacacacccaatatgcgtggtctccaggtttcaagccatttctagtggtctgaacatagctccatgggggacatgtacatctaagctcaaatttctctgttttctgtagggaaaaatctctccctctgcgggcctatctccccacctgcccaccaggccggggagcgactcccctgggtgttgtaaggactcattaatgcttgtaacactccaaacatgtggtgctaagtggaactccatgctgagattatatttatgcagtttacttcctttctgctctattgtcttgttacatgtttactttatgtctatagtcatttgaaattcaataaaaccaattaaacataaaaaaagaaagcatgcagtaataaagaagtcgatggcatacagtttggaagggtcaaagggtaccatcctagtgttcctagaagcatcacctccccattgccggagggtgcttcatcttatcagagagtgcactggggaagggcagaagggctttagaaggcacttgcagggagcatgcctcccatccctttgcaaaaggaggcttcagtgtgggactgcagcgtgaatggtggagagggggagcactagggaggatggagctggaggtaggagtttcagaaaaaatagctctaatctggattggcaaagggtgggaaaaaaagagctctggcttctgctttgactgattttggtcggtaacctctgagaactttattttttctttcatgtatgtatgtatgtatgtctttatttatgcaaccctctggattaagcctgctcttgctaccactgcttaaactgaaaagatataggactgcatccattttccttcccattctctctccctccttccctccttctctccttctgcccactccccctacttctctgttcttcaccttctctttttctctttccctttttctgttttcctttcatttttccttctcctctatgggaaaaataattgatcagttgacagatctaggtcaagctggcaggggttgctctgcttcatgcaggcttgcctaggagaaggaggggagagcctgtcttcacagttcacaaggagcccagctgatgggatggaagcggggagggaggccaacggaccatgggcgagttcagccctccccaaaaggttctctgggatcctattaattacagagtcttccattatttggtatctctcacactctaattttccatatcaaatttatctttgcctatttcctgctttttttctcagcttctataagctgtctgtttcggtttttcttgttcttctttctacttgcccctcctttctcttctccttttctactgcttctaaaatcatgacaggagatcacagaatctcccctacttaagtcatattagagaaatggccttttgtttatttgcaagtggagaaacagaaaccctgccagaagagctctgtaagtcatttgcaaactgcaaaacaaaccaacaaagattcacattttcattgcggagaagagcgtatttcaagagagactgtcaagctaagaaatcaaatattggaaaacacattcttcagctctgttactaaggacatcttaggttactaaatttgatttttttttttttttttagcttcagtgagagtattgccctttgcgataagaaaagactgatcaaaagactgctggttttggctttacttcctcattcaaattcactcgctagtggtgcttcctttgctcatcttggaagcgccaccaaactctcaccctaacaccaaatccatctggttgtttatttgcccacgggttcaatcacatccaagtgtttattgagtgtctactacgttcggtgcactgttttaggtgctggagataaaacagcgatgaaaaagcaactaacggataagaccaaagacctagttgggtctctcagatttggtttggcttggcatcctttgtcataaacggaaagcaacaacagcagtaccggaagcaagggtggagacttcatggcacagcctctggcctcctgtgcaaatgatgatggatggcagggaagtaaccagccctcaatccttgttttgagacaggggtttgggaagaggaggtgcacaccctggctctgggttctcataacacagagatgctgcctttgctactccacacaacctcttgtagaaaaggagctcatggatgcctttggtgtatataggatggggaatgctgctgtgagttcactgtctttgtggtcattgtcttgtgtgtttgagttactggttgatgctgaacatcactgtcacctctctggcctctccacttcctttatgccctgacttctgcacagaactggagggccaagaagataaaaggagaataccagataaggccagggaagaatttgcctcagacagcttttgtggatgaggcaaatactattcttctgacctgtgggagggattcagaattcagggtagagctaagataacctcctctatgagaacccttttaatttgctatccaatcatcacatcttaatttagagttcctggaataatacaaatgcattattaacaaaaggaatttctttgttttcttctgatggaatacagtgttttgggcgtcacattgtgtagttgttctcctacacacccatcttctttcaatccatggattgtgtttgcagcactgtgtgtacagaggtaacaaagctgctctggcactcacactgtgtactctagctgcaccctgaatgctttgggagggctgctgctatctgcatttccatcacggtggtggtgatcatgcctaggttttctcatgaacaagaacaggtaattacctttctcataaacccatgattcttccaagtccagtggtctagaccaattatacattgcccaacttgatctcagaagtcagaatgatcctcagtgggtaggtgcaatctgcatttatttgcaatactctgtctgaaagccagtggtttgcaaacttgccataccatagaatcacctgggaaactttataaaaataccaatgtctggaccctatcacagaccaattaaatcagaatccctttgaatgggaccctacactgatatttttaagagctctccaagaaggcctaatctgcagtcaggttgaaaagtgtacctctaaagccatctgaacatgttcaaagaccttgggtaagacacatcccctatataggcttcagttttctcactctaaaataaaacacttggactaagagattttcaagtctcattccaagttcaacatttggcaatactgcaaatagtctttttgagtatagttattgataggtagtggttctaaaagaaaatactcagcaccagcctctgcctgcaggaaggtaagaatataaacagcatcacagacgaatgaacagagtcagaacatgtaaatggtgtgtgtgcgtgcaaactctacgtgctatctcatatatatgatgttgtgtattcatatatgcatgcatttatttacctataaagcatccttagaatggaaggaaaggattaacttgtcatgggtagggggaatagaactgataatgactctcaattgatcaattcctaagccttcctgcaagagaaattcagaaggcatttgattgagggtcaaaaaggaatgtgattgagctggattggagagtgctcagcaatgacaagccttagaagaagctccatccttagatgtgagaattacatatttctcttctacctagcctccctgcccctccccaggaatcagttatccagctgcattgcttccactgctccctccttctcatggtcaataaagactcatgctcagaacctcaatgacaattttgcagcttcatatgttaggtagaagtgatgctggctccactcacatggccaggacagctcctgtggtgtatgccggagtgaaaacttgtttgttttctgatggagtcagcagatctaagaggcacattagaacagggctactggcagatttgtgccaagtttagtctctgggtaacccacacacccacctggctccccagagtgttcatactgctgtgccagacaacccctgattcacaaccagctcaggctgggagggaggctcagagggactttcaagatactttatttcagttcctcttttgggctctgacccctcaacaatgcagctgcagtggtcctccagcctctatctccagtgataggaacttgcatctcttcagaagtccattgcatctgtcagatttcaggaagacaggaggatgggaagaagaggcaggggaagaggaaggagaaggagattctgccttcttatagaatccagccacatgtcctatatctggagagtgattataacgtagcggctcctaacacagcggctccaggaccagattgccttgagccaaacctgggtctgcctctttctggtttgaggtctgtggcaattgaatcaacctctgtacaactcagctcctcttcaataagatagagataattataggacttaccttgtaaggttattataaggaataaataagttaatgcaaataaagtgtttgaatactgccttgtacataggaagctctcaataaatattacctaattctactacccacaggactggtctagtttttctacatgactgttttcaaatatttgaaactgtgatttcctccctttctcccctggatctcctctttactaggttaaatattccaaggtttgcctcctattttctataaaatcatccattaacagagtgctggtggttcttctctagagttgttctgcttcctctgcatccttcttccagtcttctcccagtatgtcctggtagcccagcatattagagcccagcatattatagcttctcctgattccaaatccaagtagaatgaagtctcagctctctgccaaggcatgtgaaatcctaagggtctgtcctcagtttgcctctctcctaaactgaggcactccctgctccatggcctctttggggtttcctgttgctccctctgtaaagcacacgagcatgctgttcctttggcttatgctcaggccctaccctgcccctctctacctagaaaatgcttttgatattttcagactgaattcaaagttcagtaccctttcctttgagtcttttttttttttttttttgagatggagtctcctgcctaggcttcagatgcaatggtgccatctcagctcacctcaacctccgcctcccgggttcaagcgattctcctgcttcagcctccaaagtagctgggattacaggcatgtgccaccatgcccagctaattttttttctatttttactagagatgggatttctccatgttggtcaggctggtcttgaactcctgacatcaggtgatccgcccgcctcagcctctcaaagtgctgggattacaggcgtgagctaccgtgcccaactgagtcttcttactgcttctcttatgcttgccttgcactttttcttacctttactgttcatatccacaacctgttagtgtaggtgacctatttacatgtctatctccccttcccaggctgtgggctccagaagggccaggacaatcttatttatctttatatacctagtacacatagcacagcccctgggacaaatgtgacactcagtgtttatggatgaaaggaagggaggaagacctgagatcccactaggtatttcagctgccctgtaactctgtcgactcaaggtgagctattgttcattcaactcttccttatcgtttgcctgagttgtttcaataggtatgcaagagcctgacctcagaacttaccctttctattataaagccattttcttagattcaactcatctcttctttctgacaaatattttttttagatcctaaatcttttttcccgtatattagtaatccctcctggctgtaatcaataataaaccggatgttatggatacctatgtagtagtacttgtggagctcagtatttcaggctaaactgacccaagagtggaaaagtcattctaatggtgaactgctcagatcagtaggggaagggggaagaacctacgctctacatctaggtgaggtgctggcatcagagggaagaatggggacagggaaggttgaacctaagaaaagaggaaaatgactggatgaattcatctagttggagaaggtgaagtggtccagtgttttttagctgtttctccaaatctagtctctcttccacaaagctgtccactagagtacttgactttcttcctgaacagtcaagaggaaactcagcccagtcatggaatggattaatcaacagctttttttctcaatgcaactggtgatacacgaatatttatagttggataaaccattttgctaattctgaagacaaataagaattaactaatcattctacatttcctcttccttttccatgaaaacttcctaataaaaggatctaaatgccatattgtcattttttttccgttattttttcatactgctaactccttgtccaaggtcaaataatttaataattaaatccagaagctttttcatggactcctagagttgtgagataccgtggcatttcacttgccctgtctcctccccaaggcaacaatgccatctgaactgtgttgattaattcctgctcaagaactccagagatttctagtgaccagacactcactacctgagttgtggctctcagttctggctgcctatcagaatcacctctggagattgttataaagcagatgcccaggtctgactctcaaaaattctcctggcacaggtcagaatagggcaagttcatctctattccaaaagaacagcagatgattctattgggaggtacagctaagcataactgatgttaacactctttttcatagctgataaactatgtgagaaagcactttgcaattctggcaggcattcttgatgcctcctcaatatcaattctatcctttctcttttgaaatagtactctaaattttttcatagtaagaatatgcccatttaaaatactcaacttccagattctgttatgacatatggtcatatactgcggttcaggccaatgggatacaagcataagatgactgggtacagtgtggagggttgtacttggatggcctgtgcttttcggactttattattttcccttcttgactgggagactgggatccttcctggaggtgcaggatcccacttacaaacaggaggacaaagaacacatatcaagaatgacagagaaggatgcttgtaggtcaaaccacatggacttgctgtttgggtaaataaaaaaataattgagtataggtaatttcatatatctcaaactgatagggggaactcaggttcaagatgacatagcagttgtaccagctctagaatgcatagttataaagttatcatcacttgtgaaaaaaaaaatctccatttaattagttttcttttccttgcagctgaatacaatcctaatgaatctatgtggaacaaaactttgcccctccctaagttttgcctttagagctatcaggatagaagtaaaagtgtatgatccactttctaagagatgactatcatagaccctacttatcttatcgtggcatccttcgttctttcttgtgatcatcgcatggcacagtttctggagcactaatcatcctgatcattatctttgaaacatgaccagtttgataatgatcaactgaaaaggttttgccagagcagactctgccagctgtagtctgactggcaaagtagaaagtgaactgttacttagcagattttggactttatagttacataggttcattcaattattgtgttagtttcattctttttttttggatatgccacatccttggctcattttgaggctgtatttgttcctctcacaaaataactgattccataagaccttgcctatccttgctcacaggtgatcttctctaaatgatctttttaaacacttaaaactttattgcccctgtgtccattgtttaaatccattgagattatttttcgatcccgatgagatgtcttcatcagctttttgttatctccaaatgatacagacatgacatctccacatcattgaatctaatgataaaagaacaacataatcgatctgaaagcatggccaggtgcttacttacatttatatttcatccacttcagaattatttgttcagaccatactaggtattaggcatacacaacaacaaggcaggcatagttcctgcactcagttagatagacaagtgactaccacgtggtaagtgctagaataaaagcaggtaagtttgctatggcagcatttgggagacttttcaggacaggaaagttctctggaaggaagatatgttaaagctgagagataaaggtgaatagatttaaccaggtgagaagagagatgagtgttacaagtggaagaaattgcatatgctaacgtctacagggaagagagcatggtaggagttcagaattctgaaatcaaatatggctagattgagtgtgtttgtatggggtgatgggaggaggaatgtaggtggaaagacaagaggtatatgtagagaggtaggtagaggtcagggctagaattgttttcattgaagattttatactgagggaaaagggtgcattgaagcgttgtatgcctgagagtaacatgaccacatttgcagttgtagtggccaaacaacatgatttgggttcgttgaaaatggtaatgtgtcactctagttacaatatgggaaatgaattgaagttgggcaagactagaggaaagggagcctcctaagggacgttgcaaccagttaggcatgaggtcaccagagtgacagttgcagagaaggagagacatgggggtattcaaaagttgtggaggtagaagggttaagacttggagatggacggggaagaagaggataagtaataaagaaagtgtaagaggacttccgttttctaagtgaatggcttagaggtgggttttagagagatagtaattaatgcaatttgggtcatgatgggtttaacagtagctttccaatatgaggttagctagatggatctgaaactctgggtatgaaaaaagacagtcttcaacacagatacaactaattacccagggagagagtaaggaatacataaaaaagaattgagggcaaacactagtctttaaaggctgggaggagaagggatctggaaaagcagattgacaaaaagtggacaaatacataggagaaaaatctggaaagcatgaggccatcaaggccaaatggtgtaaatttgaggaaggcaggaatgtcagcagtgtcaaatgtttctaaaggatcaagggagattatacttagttgcaataatctcttccatgttcttggggataacagttttgtggggcggaacaatggggtggggatacaaatagaaagaagaagtggagtcagaaaatgagtgtaattatttcaaaaggttttctaatttaaagagagagagagagagtgagtgagatgggcaggggccagggaaggagaggcaagaaggaggatgtggtgatggctggccaggtgaggccctcagggaatacaaacaggtgggaggagtggcgaatcctgagaataggtacagaaagaagtcttgaaaagaagaagaaagactgcttccattactctttaaagtgaggaaggagagaagtgtttgagaatatgcattatgattagattcagctgcaaatgacaaaaatgatgcaattagagtggcttaaataacgtaatctgtatccctctggttatggaaatactctactttgtctgttcatggctagtgaggtgttccccaaactcaggcacccaggcctttctgccatctggacctgttgcacatggccttgcctccacagtctaaggcggcagcatctgtgtgccagagtggaatgagggagagatgaagaagaagcaggaggtacccgggcattgccccctgcagatgctcctggaggccatcatgtggcatccttgctcacctcctcttgtccaggactcagccacattgccatacctaagtagaagagcatgtgggagactcacaatcccctgtggatgatcacatgcccagacaaagtcaggggcctaccaccatggaaagagggatggacattaagaaactattcgtgtgtcacatgaaaggaggaaaaagtagtattcccttgataaggatggaagaggccctctagtccatagggtacacatatggttaaggcaattctaccataaaaccatgatgtttcaatatcactagtcattagggaaccacaaatgaaaaccacaacgaggtacaacttcacacccattaggatatcgctgatgaaataaaaaaggaaaataaatattggtgaggatgtggagaaactgaaacccttgtgcgttgctggtgggaatgtaaagtgatgcaaccacagtggaaagagtttgggggtttctcaaaaagctaaacaggctgggctcagtggttcctgcctatagtcctagcactctgggaggctgaagctggaggattgcttaagcccaagagttcatgaccagcctgggcaatacagaaaaatctcatctctacaaaaaaatttttttaaaattatccaggcgcagaggtgcacacctgtagtcccatctactcagggggctgaagtgagaagattgccttgaacccaaaaattcaaggctacagtgagctatgattgcaccaccgcactccagcctgcacagcagagcaagactcagtgtctaaacgaaacaaaataaaacagaacaacattaaacatactaaatcagtcagtgaattggaaaaaaataagctaaacatggaattaccatatgactcagcaattctactcctgggtatatattcaacagaatggaaagcagggcctcaaacaggtatttatacatgaatgttcatagcagcattattcacaatagtgaaggtagaaacaacccaagtgtccatcatcaacaaatagataaacacaatgaggtctatgcataaatgggtattactcagttttaaaagggaaggcaattctgacacatgctgcagcatggatgaactttgaaaccattatgctaagtgaaatgagccagacaccaaaggaccgataaggtatgattccactttcacgaagtacctagggtaggcaaattcatggagaggctatcaggggcttgtgggaggagggaaacagggagtgatttaatggtcacagagtttctgtttgggatgctgagaaagttctggaaatgaatggcagtgatagttacataatattgtgaacatactcaatgtcacttaatggtacacttagaaatggttaaaagggtgaattttatttcatgcgtattttactagaatagacaaatgaaaattaacagaagagataatcagctgtctgtggtgtaggaaggaggcaggtaaatgtgtaagcttggtggcaggaagttaaaggagttcgcatttgctggcttttatttgccctgagtatattgcagggaaaatagtgtgtgtttgcacacacctatgtccaggtccacatgtttgtgtccatatacctgcagcctggtttttccaagagagcaaaaaggactaagctagttgcttgtgtaatgggagagacagctgatgagtgaaccagagaatcctgtgcagtattaatcacttttccctcatgccactgtcttttctctggactttaactaaaaatataatctaccccagtcttctttctttatccctttttttgattctgctcctaccatttagggccatctcccaaacatatccagagctcaccacttactcctttcttgcattgcctttttaaggaattaaaaagatatgtttttatctttacaaattacaaagcttattatatcaaatacatttcttaatctccacatcaatcagaatatcctttctcagcccagtctatcattaactttaggggctgagttttttccccgagcccttattttcaccatctttcaaataggatatttgaatttccttggaagatagttttcacatttaactgaattaactgtgtgaaaactttcggcactcaattcatattgcaaaattaaaagccaatgtttttgaagctcactgacagcacaggtactcgtgactggacctccctatcaaagtcatctgcttccctttcttggagctctctctctctctctctctccctctctctctcactctgtccccagcactcccctcttcactctgctccatcgccccaccaaacactgaacactggtgcccttgcacagctccatacctttgcaggagctgctctctaacgggaatgttcttcctgcaggatcaggacagtggaacactgtacattcccatcttagttatgagtgatgatggagtaaataagaccaggaaaagaatttaagaggctgagaaaggagaacaacaatagcagaagagggtgcctttagttaacaacaaagtattatatatttcaaaacagctagaaggcttgaaatgtttctcccacgtaggaccattgtttgaggtgatggatatccctagcaccttgatttggccattacacattctatgcatgtagcaaaatatcacaggtaccccataaatacacacaaatattatgtatcaataaaaacatttgtaaaaagaaaatacatctgaaacccactccccccttaaaaaaaaaggagaacaaaagtttgtcaagactgactccaacccatcatttttataattagccttcctggggaccccggtttctaatctgccctgggaaaagagaaaggagtctgtgacatctagcatcattagaccaggactctccaagcgtggtctccaaatcagaaagtatggggccagaccccagcaatctgtgtgtcaagaagcccttcaggatattcatcctaaaatttgagaaccattgatttaaaggagtgtgaagactgaatgttgggagctctttctggaagggccactcccagggctggacatgtggaaaaggaagcagcagcatggaccctgcctcctgggaggggcctcagtgtctctcgaatactctcaccttagaaaaaaatcctttaagccaccgggacagaggaggcttggtggtgtgtaagccgtataaatatgtacattcacttatctatgtaagtacatatagattccctttggctagggctgccagatttagcaaataaaaatccaggacaccagatatatttaaattcctgatcaacaaatgatttttattatgcagagcacatactaatactaaaagacatttgggttttgggttttttttttttttttttgcaattcaaatttaattgggcatctttttcttgtttttagcaggcaggatatcctaccttttgcccgtaagtattaggtacttagtggaaatagcctgatcagaatcagtgtctaaaaggtagaagtgggttttaatggcctatttatttacattttaataggaatgtgtatgagttggcagggaagaaaaagaatgctgctctttctggctcattgtattattttaagatctgtatttggggaaagagaaagcaaggaagagaatatagggagaaagatggtggttggcctggagtggtggctcctgcctgtaatcccagcacttcgggaggtcgaggcgggcgaatcacttgaggtcaggagtttgagaccagcctggccaacatggtgaaacctcatctctactaaaaatataaaaattatccaggtatggtggcacgtgcctgtaatcccagctaattgggaggctgaggcaggagaattgctggaacatggcaggcagaggttgcagtgagacaagatcatgccaatgcactccagcctgggcgacaagagcaagacttcatcacaaaaaaaaaaaaaaaagaaaagaaaagaaaagaaaaggaaaaagaaagatggtggttgaaagtagcctatatgccagcaagtcctccctctagtcaagtaactgagcacctattatgggccaggccctgattcacatgaccctgagtgagatgagcagcaacgctctaggaggttgagctccctgcctcgggcctggctcctgggcaggttccctgcagccaccccttacctgccccaggtgacaggatgccacctcagagggtgggaccttgatgctgtggctgggcagtgaatgacaagcttcctaatgagatggagctgggggagcggcttgctgacagaacaatttgccggtgcccagaatatctgcccagcctcggcaaagcggcagcctggcgggcggcagaagaaatttcaggatttatcattcgccttggtggcaggtgtgccgtgagccgccctacttcccgctgtgcttctctagacctgcagactggatgggcaatccacccaggcttctagagcctcgggaagaacgtgtaaaactatttcctattttttcctcctcctgatcagcttgtgttgatgtaaatgactggaaaagcagttttcggcttattttcacagcttaagggcttcgtgagaagcttattattgaaaaattagaaactgaaaacaacttcttagacaatgaaatagcaacccagagactgtgtgtgtaaggctgggtgtgctgtaactggctgcgttacaaataggaactcccctgggattcagtaatcaaacacgtggcaacaggttgtctgtttcaacagagagtgagtaatcaaaggagatttgcagttaatccaaatataacagcaaagcatccaagggaagcccggggaaaggagaccagaagggtgaggggtggatgaggccactggtttggagttccagatgcaacagagagaactgggagaggggcagaaggttgatctctctgggtgcttgtgttggtccatttgcattgctatgaaggaatacctgagactgggcaatgtacaaagaaaagaggtttatttggctcatggttctgcaggctgtattagtgtggcacaagcacctgctcagttttgggtgaggcctcaggaagcttttagtcatggccaaagagaaggggcgctttcatgtcacatggtaaaagagggagtaagaaagagaggagagggaggtgccacggtcttttaaacaaccaactttcgagtgaatgagaatccattactttgaggaggggaccaagccattcatgagggatctgcccccacgacccgaacacctcccaccaggcctcacctccaatactggaaatcacgtttcaatatgagatttggagggaacagactatcagcaatggaggaacaagctgcacagaggaaggggaaactgagtcttggctacacattgaagcaaaccagaaaaataacctgagcacttggcccctacacttgaccagtgatgtaaaatttgggaggaattaattagcattcagtgatttacttcaaaatcctgagtcctacacaggattgaggtcggggtggagaaggacttgctccaactcgatgggctagaaagaagaaagtggtgcaggcctgggaaacagtggtaaccatcagcatttcagggagacacttcagtttgcatgtgtatctccatggttctcaaagtgtggtccctggctggcagcatcagggtcccctggcacttgttagcaatatgaattctcaagccccacccccagagagccctctgactctggacctctgagaggaggcccagccatctgtggatcaagaagccctctgcatgattttgttgcatacttcagtttgagaaccaccagcagacctggttacctggccagaggtaccaggaggtgctcactcagggttcgtatgtgggcttgtgtgtgaactactacgcccagtcccaggtgaggtcctggagcaattctgtgctgacccatctgtcctgatcttcctaaccacacggggctgcggggaaaggcacacttactacacgtgtgctactaccatgtgccaggcactgctaaatgttttatgtgtgatattttatttaatctttccctgaaccttgtgaggtaggggttgtagatagcattttagtgctgagaatatttgagttcagaaaggccaacttgcccaggtctctatgtttcctgagtctgtacccttattcattctcacgcagcctctccgccacatacttctctgtccccacatgctttgggtgccacctacacaaagcaactaccagcctggcagggccccagctctccactgccaagcttggccctccccgccccactccttgcctcatgttaatttcccacctgagtactgagtactttataaatagcaaatctaaaatgaattttctaccagcgatcattagctcccttgacatccattaaacattctcgcaagcagagcgaagtgacaaaagggattgatttttacagtatgtttaataggggaaaagaaagaaaggtgttgacaagtctttttttttttttttttctgtcctgatatcaccaggaatttgaaatcagtcaaatgacttttatctgggaaaaaaaaaaaaaaaaaaagaaaagaaaagaagaaggctaggattgggtgcgggaggagagggtcgggagacagaaacaggctcccagcaccctgtgcggctcatttctacacccgtgacaggtaaacataaagttagttacctagtgccagccaccaagatgaatatgtcagatttaatgcttcaaaatatatagggtccaagccagggagggagtagcggggagtggaggaggaaagaaggctgtattaagggagagggaaaataaccaatcttctgctgaaactattggaagaataaatgtgttgatgcaatagttgaagtcagagaaggctggcatatgaggcactgtagctgaaaatttaactttgatttcaattttcatatttgtcagcgataattagattcaagaaatgttttgccactgctctaaaatactaataagtagaggcctttgtagtttggttaatggagtcttttttcctagtggtctaggaaaattccattaaagcaaaaagtcatactatattacagtgtttcaatacgcattgactctgctgccgcggtgatatcatcccagggatgggagtcctgtgtgcaaccacagagcccctgaagggatgggagtcctgtgtgcaaccacagagcccctgaagggatggtagtcctgtgtgcaaccacagagcccctgaagggatgggagtcctgtgtgcaaccacagagcccctgaagggatgggagtcctgtgtgcaaccatagagcccctgaagggatgggagtcctctgtgcaaccacagagcccctgaagggatggggttgggcttcataggccttagctgtctatcatttcagacctgcacagacctccctggctcatgggtgagggtaggggagagagaagagcaaattcaataaagcctcgccttgagaaggatgtgttttataagcttcgcctcctggagcaggttgaagagagggcaggaggagttgatgggcacctgcctgaggagaggaagcactttccctgctctccccagtctggacgcctgttgcctgttcctttaatgaagaagctccacccagtggcagaatctacatgcactcctcctcccaagcctcagcctgctctgaaagtctggaaggttgctttctcttgagatcagaatttgattaagagaaccaaggtctattatttttgactggcttttccctggagtgcctgtgcatctctgatatcccaggtaactccctgcagggcaatatggggtggattgggcttcacctgctttaatgtagaggtaagtgaagggttaagtgtattgtgcccacacactccagagagttcctgtggatgagggaaggcctagggcatcctcatctcccttctaccctactttccacaccactcccctgccgtcagggattaataatcacatgctgggcttattcagacgggctctctctgtctggaacgccctctcgtaagcagactgctgctgcagccacctgttagcccatctccctgagcccagggacctcacggaccctgctctcaattgtccttcccaaaactctgaagtggatccccagactgggatgccagtccttgccaaaagaaagccccatgggcctgtgtgatctcacccacctccccacacatgggctccttcatgtcaaattgtgctcttcttgacatagtagtagagagacttggaatttactaatcctaaaccacaaatgggaagtgatggaggaatggacagatggcaggtaaggggaggagggtcccaccaggattgccacctaggcctggataaagatgacttgcagaagccacacgaagcaaaagggagatcacgcccattccattagtgcagggcagcagcaaccgcccatccttccctgtgcccatcctgggtgcttctttcctggccccgtgccctcctcctactgcccccaccaccacctcccagggtgaacagagagggagggcctgtacttcttcccaacagcgcaaagacctacctttggcccatgcctctctctctccgcccctccttccttccctctttccccaccaatcgctgcctagctgcagcttcacttttctctagtggcatgtgccagatcttatccctgtgaagcacttgaggatgaaagaaggaaggggatattaaatccaccagtgatacgtgcaattgggagaggcttttgttgtgtcatttcctacctccttcagcctattaagcaaacaaaagtgcttgtggaatgagaaatgtaaatggccaatgcaagccgattaatcctagatgtacaattccattaataaggccgctttttaataggcggctctggcagcaacagcaggcaggccaggaattgatgtattctctgtaattgtattgcaactaataggatatgaagaaaattgtaccggagaagcaggtctttcaacacgattttccaatcagctgaaataatgacttgcaggggaaagccttgaaaaggaatgacacacacaaaaatacaacatcgtccagaagtgtccatgattcccagtcccagcttgaagcttctttctttctttttcccctggcttccctcatttctctctctactccactctcgttcttcatctcttcttccccataggtaatgccaagacccagaagagtctggtcacctgtggagggcctcccagggagattccccacccctgccccccagccttttgcctgtctaggccccctcactggctgagattgcttggtccaccttttgagaagtcagagcgagaaggagagaggctgggtgctctatggagagaagactgagtagggactcagtgtcggcccttctactaatgctagttgttgagtgactttggagccatgccttcacctctctggattcttatctgaacgaaccttccagccccagaatgcagcagctctgagtgcattttcaaagatcaggctaggagaaaagctggcatcctttcacttcaggaccaacgaaggctatctaagaagaagagcccttttctaaaggggtgtcctcattatctgaacatccatctactgagaggccctgcagaactcaggcatctcagcgtcgagctcagctttggaaatcaggcctgtgtgcatacttaatcatggataagttggtcaattcactccttccttcaacaaatatttgcggggtgtcaatggtgcactaaggcactgttctaggttctgggaatgaaacagtaaataaagcaggtgaaacagaaatcaatccttgccctcatggtgcttgcagtctatccagtcagcaacacttttggtgagcctaacagctggggtgttaggtacgggacctttctctgagactacttagggatgggaactaaaagcccctctgctgttgtttacttggccaaggtggcagtgggagccaggctgccttcacatgacccctgccagcacctctcagtcctgctctcagcctctcctggtcactgggtctctgtcctgcccatttgtgtgtggactctgacccttccttggtcacaggctggagagtagatataaaaagaaaaggcaaagcacatttcagttgaagtccccaaggaaactgatatgattgctgaacagaaatggttccaataagggcagagaggaatattgcttttatagcttttgagacataaaacatttagaaaatgtgattgactggcagggtctaatttatcatttatctcattccctctgctctcacactctgtcttgctccccacaacacccaggcagacactcatgtgcaaacttttttctctcttttttctttcctttcttcttctctttctgagacttggatttatcatcattccattaagcaggagaactcctgtggctatttataattaatgctcagaaacctgccaatccatttaatgacactaacaggtcatggcccccttatagctctccattaatcatcattagaaccgctctgagtttttacattccttttaaatgttaattcacctctgtaatgctccttttagttaaaactgtgaagggagaagtggctggtgtctccatgctgcctgcctgggaatggcgtggtggggttgatgaagtctggctgatttcctctgttctttttctcctctgacccctgtccctgctaccagatgtcaacccagtttattctttggttgtctagatttatcttctaaaaaacacccagtggcttaaagttctgggcaaataaagatatttgaatacctttggcctcccaaggctcaagcaacaacctgtgagaagttcttggcttacccactaagacccagggtcctgacgtggcagtgcagctcctagaggtgagggggcagaaagggttctggaggtgagcagggtctagaactgttcatgcaatgtcccagcactcaagggcaggctccagaaaagcaggtaaaaagcagtcaggtaaagaattatctttctttctatcaagagagctgaccacttgcttcatttttgctactgatgggcaatgagactgggcaaaacattcaacctccttcctcacctacaaaacggggtccatatctgtcatttccaaggataagggttaaatctataaaatattaactggcattgaaatcatcctggacttttaaaaccgatctcagtgccaggcgtagtatcagtgtcatttcttgagcttctctgccactttcctacgcacagcttgacctcctgctctgcagccttcatccccgtggatgtgtacaccttcacacctctcggtctgttgcttttagatcatatttcaccagccataaaagtatattttgaatcattaaaacaaatatggtgaaagaagttaaattaagaatgggtaacacatggctgggcgcggtggctcacacctgtaatcccagcactttgggaggccgtggcagggcaggtggattacttgaggtcaggagttcgagaccaaccgggctaagatggtgaaaccctgtctccactaaaaacacaaaaattagtcaggcactgtggtgggcaactgtaatcccagctactcgagaggctgaggcaggagaattgcttgaacacgggggacggaagttgcagtgagctgagattgtgccactgcactccagcccgggcaacagagtgaaattctgtctcaaaaaaaaaaaatggggaacataaatgtgaacaccaattctgttattgattagctgtgcaactctgggaagctcacgtcacctctctgggcctcatttcccttacttctggactctatatttttaagacgccatgatctagtaaatcctgtgattttattgctttcctgtgagtcttcccaaggggctaagacagtcactcaggaataactgggaaaaagtggtcctgttttgaccatctgagctcttaatttttcttgtcttgtcaagtgacatgccccagagttgagtgctctaacaaaagcaaacacaaatatatgaggaaaatagacaaaacatttttaattcatttttgactcactgtctcatttttctaggcataatccatcttcatgttaggcctttggaaccatacacttgaatttactttcaaggctgcctgaaatctacatgttcagctgagaggatccctcagggccaactagatagcagatgcctcatcaattttatcattttacctttttaagtactccttcagaatagcttaacctcattttatacaggggtaaactgaggctttaagaggtaatgtggctagtccaaggctgatgtattttgtagttttcaaggtcatgagtcaagcctagctctcctgaattgaagcccagcttctaattttgtattatttcatcttgctttgcccactcccatagctttctttgggcgggcatgaggcaatacaccttgaatgaaataaagacgtgtcctatcagttctcctgttctggcatgagttataactagtgacctctgatttggactagcaacctcctttcctgagtttattcttcattgtgttcaagttcccttcggcatcaggatgtataaatgggcttcctgggggttttctataagaaagcccaccagccatgccttctcttttccagtctttgtacgtgtccccagttcttacagggacagccatactcatctctcccttccctgcagagcaccgctgatagtctaagtagacaccagtccccaggctgggctttggccatctgtctgcccttcacttgagaatgcaataaaatctgcttgacaattatgtcagtacaaagggcagagaggactgcatgtcaaaaagctgtgtaaaatttattctttcaaaggttgtatcaagaatattctggccaaaaagagctctaatagcaactgatcactgtgtcatctgattctttttcacatggctactttcccctattagtggatttgtgttagttctgcttgggaccaagttaataacgataagaccttatcataatgtagcactgcatatgtttgaaagggctttcacgaatcgattatatcatcaaatcttcatgactgcagttggattttagaaccgaaagggctttggaaaacacttaacccaacattctcagttgattattattgatgtattttgtttagcttaagtaatgtatctttattaaatataatttggaaaccatacaaaggaagctttaaaaagatttaaagtcactcatgcacaattacatttaatgtatttttttctaattttttcttattctctgccatggttttcattatgtagttataatcatatcatttatatctcatttttttcttttaagaatagatcagaaacaattttccatgtcgttacatagtattagtgagcatcgttttaattggtttcattatattacatcaagtagatgtacaataccactgcactgtgtttggacatttatgttgttctaattttttgctgttgtaaataatgtttcagtgaacatctccatgattatggccttattccactgttatgattatttccttacacacgatcactatacattctattaccaccaatactcttactttactcaggggaaactgaggcatggaaaaacaaagtgatcccagaccccgcatccagttagtaaaacaacacagaccccaagtgaggtcttttgtctcttggtttcacattacttctattatataatatagtggttttcagaatttctaaataaaaggcttgaacattacatgaaagtaattttatttttagtacccagtggttgagaaaaaattacaataaaaactgcaataaatattgtagcacctgtaaacaacgtgtatgcaattaaacacagcagcattcatatgtacttggaagtggtgcaaacagtgcacttggagagaaatgcattgaagctgccgacaacacttcatgtgcatatggaccctaaatcccttttaaaactcccctcttctcctcgcaccccaaactcaggtccattgttctttaaaaagaaagcatccttagtttgctgccaggatgttcattccaagctggagtccatgggtccatagttatctccctttgaacctctcctgccctgaatttacagggatagcaagcatggtagaagagagatggactcacgattctgaatattgagagctggaatagtcctgcagtgagattaatgtacagacttcagggctctacaacccaaaagaagagtctccagtaataacagtagtttaaatttgctgactgccttctaggtgctaggtacaaccccagttgctatgtatggattgtatctgttcatttttacaagattgctgtatttgtcacagtttcacagatgaggagactgaagaggatagttgaactgacacagaaactgagtgatagggtggggctttgagtcctggaagtgtggttgctaatcctatactcttaccctcagcacacagagcccctcactcagtgtccccagacatttgagaagagatgtgatgaggccggccatggttctcttgtggtcagctcttgttctaatccttagcgcccatttggaaaccagttatggggaaagcacaatgtaggactcttgggactctgcacctgactggctggctttccaagatcactgagatggctcttcctccagcatagaaattgatggctggttatccagacagcaacctcttttgcccatgtgcttggtgctctgtcatggcgggaaaagtaactatgcacagatcatgattatggtattagattgggtacacatgaaattgctagtatgcacctattttgatgtatgaaaatatcattttcatgagattcatcctaatttatgctatgtatggggcctgattgccctaacagctcatcattgattggtagcatgttgtaataatgaaagagagatggatatctagctaccctacccaccccccatcagcataaggaagccgagaagggccccagtaaagctgagaacattggaggatgacaaggctgtaaatgaatagacaggacgtcacctgtcctttctctccaatctctctttgtgtcccctcagtttaccagctgtcccgaagcaattgcagctcagtgtctgttcccactagcttttgtgagggctctgctggggcttttatcccttgtgctgaagaccatgctcattttctcaaacacaaagcaccagaggagctccatccaaatgcacaatctttattcccggaccgtgtctctagtttaaattcctggagtgttggtcaaaagcatgggattgagaactagagggaccttggcttgaatcctgatgctaccacttactgtgtgaccttcaacaatttatttactgtctctcccagctttggttttgtcaactattagatgattttgataattaaagtccagaatagatgtaaatgtgttgatgggcattgtcgacatggaacacattgttacctccttcttttctgaatctggtgactagaatagataccagaaaagaaaatctgaagtttctgttttcacagagaaaccctatgtactgaactgtaagctgatacctaagttccagtaagtattgatatgcttatgtggacaatgtaccaaagcatttgaaatgaggaatgttttagaaaatctaggatatgtgttatcatttgatcactctcccttccttgagctttgaataaaaccacttttcttcctgctttctttgggtctaacattgggccttctatgtttctggagtctgatactgaacttcttcagcaataccttccctgccacccctgccacctgccacacacacacacacacacacacacacacacagaaatagaaaaaaaaaaggagagtgaggcatgcatagacagacagaaaatttgagacaaacagagagagacaggagaagtggaaaggagaaagcaagagatagatcaaaacacaaccacaaaacctaaaaatatttagcctttaattaaaaaataacaacaaaaaaacacctagaggccttaaaaagcatacccacaccacacaaagaatacactctcaggtcatctagctcatcccaccagagggccacatcccatcaagagagctgtagcatttgagaaggtgtcttttttcatggtagactattgggaagtctcttcttagttgtttccttgggtgaaaacatggattttgaaaacaggtagacaagggttcaaatccctgatgggccctctactggatatatgatctgagcaagttatttaacctgattaaatggaactgtaataccttctcttaatgttgttataagcgtaagtgcagtaatatgtagccatacttgatacatagtagatactcagtaaagacatgattttaatttctggaattcagatgtcctagtagtgattacttctttctctgtcttccattggatatcctttatacccacctgtgcccctctactctctgaagatactaggcatttgaaaaagatgttctacttgagactattagaatggtaaactattagaaatcataaagaatttcctccagataaattttaccattgaaaacttcttcattaccccataattatcctcatcattatgtgagtcaggccactggaaatatatatatatatatatatatatatatatatatatatatatatatatatatatatatatattttaatttaaactaggaccttcaccaagagagagactaaattatgactaatggccattccttggcctcttagttacagatgtaggagagattgttagccatgtcttgctcagccatcaaagtcttggcagaagacaccttgctcttgtggaatagcatgccctgtgagcagggagttattctaagagagtttctagatgtagtgccaattttggaaagacagctggcaggaattgggcaaagggtcgtcattgacctatatgggtgggagcatttggcttcacagagccctaagcatagattatattccaaaaataatgttatggatgcaacaccatgaaaatcacatgtcatgtcataaccaccatgatgaaatgttggatccatatttagcaattattgtggtctctgctataatactcagttccttacacaagaacttgtctaggattcagcagtttatactgaggtgttcagaggagcatggttaatggagaaaattgcttatctccccaagaaaaagaaaactaagtcataaaaaaaaaaaaacaaatattggagaatcctgcttgcccagtggccaaataggggttagcagattagtttccatgggaagtgtcaaagaaacaagaaactaagagaaaaaaaggagtcacacagaagatggaccacattaatggggcctataggaaaacagcacaagccaaccaatggagagagccagtccagccatcagctccctcgtgcgtgcccactcagaatggaaagatatacagagactaccaagaaccaacataagcctgcaagagaatgctactgtctaaaaagtaattcttaaagcatataatccagaatgaaaagtccaggcagaatgacatatcctctggccatataagtactattgaatctttaccagaactcttattagaattttacagcgtctgctgtagtaccctagagatgctccataggaatgatcaaagggctgtatcatagggcctgtgaggactgtcataaggtaatggtgttgtccagaaggagaaagaaatttaaggggtgacttaataaatttcacaattaaaataaaggatactccatgtggatgacaagcagctgctcttcattaggctttggggactgaagaagtcgaaatccaatttaattgcagtagaaaaagcttagactgcataaaaggaacagataaccaatctgcttacaactttttccagattctgagatttttaggcctcctgaattgtcactgttccctgagaggagacaccgtttacttacaatccagtcacagacagactcacctctttgctggaggtgtccctagtagtgaccatgtaaaataatgagacattcaactgagtgagcaatggctcaagtccacctctgtgtcccaaatgttacagcacatcacctacacataaacccccagtttttcactccattcctattttcacttcactccttactttctatagatgctttggtcctatgatcactcttgcagacactctcaactctctggttctctttccttctattgtatttttctggcaaaaatctcaagtctgcttgacaccacctatccactttctctgatcctgaaccttcataactagatattgctggcagaaagaaagaaacaaacaaacaaacaacaagatcaacaacaaaaaacccaatgtggtctgtgtcattttaaaatctcagagtaacaaattgcaaatgggtgtttactactgcccaggaatcccactatgcactcttaggaggtttgcttttctttcttcagagacatctaattcgtatcttctccccctcctcaaaagttttataatcttccaaaaatctccttattcccacttggagtgaatgactcatatttcattgagaaaacagaagcaatcaggaactaacttatcttccagataccaaatctcagtatacctgcctttcatttgtagggcccgaaattcactcctgttataatggaaaaaaatatttctcctcattttagagttcaacatctcaatttatgctctggggcctctcctctctcccctcaaggatttcaatcctgcaattatcttcctctttcttctacatcattgcatatttcctctccactcggtcactttcataagcacataaatctcaccaagtatctcccatatttaaaatggcaactgcaacatcaacaatctctcttgacctcccttcttcctttagctacaaacacgtttctgctcttcttctcggtaaagcttcttacaataaagatcttcatgtacagtcttcactttttcagcactcgcacttccgctttccagcctggcgttggtccacaccaccccactaaagctactctcatcaaggtcatcagcaacatttataatgccaagtgcagtgctcaatttccaatctttaatctacctctcagcagcgcttgacatagatgaccctttctgtctttgtgaaattgttcctcttggcctccctggcatcgcgccgtcctggctttcttcttacctcactaaaccctactctgtttcttttgtttccatcttcttctctgtatgctgggtctgcaaggtcttggtcttcaggcacttcctctgtcgatccacttctccgggagatctcatccagtcctgtggtttccagtgacctctatatactggtgactgccaattttacatcactgcccagaccttccccatgaactccagattaataaagacatcccacacttaatatgtgattttgttcattggttcatccatattttcatgtctctgaaattgggacacatccttcaattgatagcatcttataatctgcacctgcccaatggagaggtttagttgccattgcctgaacaagcaccgacttagtcacattcccttcccttcattgagtgataggcattgctggtactacatgtgttagggttaattgccatttaaaattccttcaaaaatgattctttgaatcacacagtgattcgccattgaaataaaaatgatcacatacacagcaatgcatagaaagggaacagcagggtgtaaatttgataacagggaagtgcatatctgtctatggaagaatgaccacaattccgtattcccctgcaaaacaacaattaagggctttatgggaccaaagacagaaagaacatccacagctgacaatttttttgttgagacacatgaaaggttgtctgttacgcttcaacctaaggcagggagaaatgggcaaatcccttggaatagcagaagagttctgatcaagggaggctggtatgaccaattgaaagtgtccctcactctttcttggtgacatttaagttaattacacaccttagaatagattacatctgttgactgccaattttatatcaatgcccagaccttccccatgaacttcattgcatccatttgatgcaatatgtgtttcaaatggaaattgtagtccaactatcttctgccccagtgagaggctgtttttccctgagtctcccctaacttagttaagggcacacttctaaacttattgcccaaaccaaaacctaagatttttccttgtccttccctttccttcacccttaacatcaaatccattagcatttcttgttagttctacctataaatatatctccaatccatatttattcacgtttgcgccaataccttcatgaaaggcaccttgcctgaactcctgcagttgcctccaggtgggttttgctgcctgctcattttcaacccatcctttatctcatgcctcctacaatccattcttcaaacagtaacctacatactttccaagcatacatccaattttgtcactcggctttatacttggaatgaaatccacacccctcctctgtggtctgttggcctccacttgcctcttagagaccctcatacatccccatcttcctcagtgagtatgctccactaaccctgtccctccttctggttcttaaacttgccaagtttggtcttacttcagggactgcacacttgccatgtcttcttcctggaaggttttccctccagatctgctgctgctggctgcattccacaattcaactctcagagagccctttctctttcaccctatttacttgcactccgtccttctctatcaggtattctgtgtaacttcctgcaactttctgaaactgtcctgttaatttgtttacttgcatattgtttatttcctccaactaaggtattaattcaaaatgacagggtattgtcttgttcatcactgatctttaagacttaaggtggtatttggtaaatagtagataattgctcaataatgtcagagttaaaaagggaaagaaaatttctttattattactgggaagtgatatatgaatgtaagagcatcatccctccaaaacatgaaatatacctcctttctatctagaaactgggacaagttgtttaacttcatttactttctggtcacttattaatttagtggccatattaaaatccttatctctctgagggattttaagaatatattgaaacaatttacacaaacaaatatcttgccacacagtcaagtcaaccttactacagcagccctgccttatcctcacgggataagttctaagatccccagtggatgtctgaaactcttggataacaccaaaacctatatatgctatttttcctcttatacatcctatatataacatatgataatgtttaatttataaattaggcacactaagaggttaataacaaaaactaataataaaataaaacaattatagcaacatactgtaataaaagtaatatacatgtgatcttgatctctctcacaaaatatcacactgtactgtatttaactatttttggacttcaattgactgcaggtaactgaaatgtggataagggagaatgactgtatatcactctgagaagtggataaaagctctttccctcctcccagagtgcacaaatgtgctctagggaaatggataaatgtacatgcataagtaacttttcattgagcagctccaaagaccacaggtaaaggcactttcctcatacaaacattggttcacattaagtctcttttcaaggtgattaaaacgactcagaaagttaagatgttccctttttgcagttaagaccacagagtagcatttacgttttaaatattgaagacgcaagtctgtctctagccacaggcactggcttactattttcttggtcccagagccagaccaactaactccacttaccatttctatcagtggcttgagggtgtccagagaatatagttacaagactggatttttaaaaggaaggaagaaacccaaggctctcaggagaggaccgaagtgactcaatgtgcctgtcatgagattcagtaagttttcacctaagcagatctattatgtggccagaaaaaacagtgtcacaaaagacagccctctgcactggcactgtcctttgcttgtcagtttgtatacaagagctacatacaatgccctggaaaacagcacttcgtggaattgtgtaatattttatagcagcatccagtctgcagactcaaaatcccagtgactaagaacaaaggtgggacatgcagaacatatgtgggaaacattcctcggacccaggggtgggacaggtcagccaggggaggaggaggctgaagaaagggaagagccacagaaaggctgaaagtggggacaaaaggcttccagcacctcccttgcactctatttgggctttgtcatactttctgccttaactcaaatactacagggtcatccctgatgggtataaaggggaaggagtcatgggtcagaaagagttcctaggacattcttgccctcgaggtttcctggctttgcagctggaaccagggctggctcccgggcagggagaggagacgcttcctgatgaagttcgggcccacccctttctctgagcaaatatgccagtagcatttgggttaatgaactgtgccttttaataaatggttcttatctcaccagagtggtgctaaattgtcaggattttaaattaacttaatagtttcgtggatggtacttattcactggttactccgaaagtagcgcggcccccagccaggacttcttattgaattatgcaacagttagttatttcatttaggtttaaggggaagtgtttaggattaatgtgcaatgcctcagtgccccccttaatgggcatttccaggcctcccctaaactaaaagccagttattaatcactgggtcactcagttgttctgtcgattgagagaagtgattgctctggtccaggaatggccaacaccctccccggccaaaagagggagacaaaacgcctgtcttctcttgctcacgtttgcaaaatatttgctgagatgtgcaaacccctatcctgcctgtaagaagcttacgtaagttagaaagtggaagtactatgacagaggcagctgtgaaatccttggacttttgaagaggaagaaaaatgaattctgtggagaggagaggcagagtaggggtgaagcatctagaaggtgctaacatttgaaaactgtataacatttatgtgattgaaaatatgaagagcattctaggtaaaattttaatcttgtgcctctctaccagataatgatcagcctttgggcaaaaagaattgccacttttgagtatttactttgaggctggtgtgagttcattgcagaaccttatgaggtatcaaccagtttgttttcaccttgcagatgagaaaactggggctccgagatggtagatgccttgtccaaagctccaggatttttggcacacaaagattctaactcaagcccaagttcatcagtgacattgttttctcgtattctcagctaaatcactcctgccctgcagacatcacatcggcactcagatcatctgcaaaacttttgtcagggattccattctgtcacaccacaaacctgactttattgttcagtggagggtgaggcaattcctttaatttactccagaggcatcatatcatcccaaagcaggttcacccatcatgcatcagaaactacctttggagaaacagaaatcaggtagcatgtggcaagtatcaatgttgtgccaagcaccgtgccaggcagggactgcagcaggcaagaggttgctaagacattatctgcaccctccaaagctgtcagggcctacataggaggaacactgtccccactaactggagatatgcaagccatgacagaaatcattgatgtcagcaaacaactaacaggcaggtgtacagccaaatactaactgtgaagcgaaatctagttaagactgcaaagtattagcatcaaacacttgtttgagaagcagaaggaagcaggagggtgtataatggagattgagaatggacatttacccctttgcactttgagtcctcattgaagctgcccctgagagcccccatctgggctacaaagaggtgttggagggaggaaacctggagaagcttaggcacagccttctggctgccttccacagagaggtgcaggagtcccacggtagttaactgggaccgccctgctgggaacttcaggtgtctctgcccccgggcaaggactctactgagactgaggagaaacagaaaacaaaacctggccctttcagcttctctgctggtccctgggagaggcacaaggggcctgctgagtggagtgaccttgagaaggtcgagcaggcctctgaagtggtgcagcggcacgggggcaggggagcggcatgagccataaaggaaatattgtctataaaagccccgttttccctttcttctggagcaggcacaaggcactgacttcattttgcattcataaagcctgcctttggaagcgcctttaagaactgctgcaggaagcctgaagaaacatgttggagggtcaaacacacatctccttgggctttctttcatctgtcttaaaaacaaaaatctctccttttttaatcatctcctcctgtaaaaagggctaatcttttgttagcagcagcctcccatggcacagcatctcagcaattaatacaaaaaagcaaggaagatgcaggtagaggagggggcctctagctgaacaggaagagggcctgggagtcaggaaggaagggtgaaggatgggagaggggaagctgaccggctttccctggagcagggagcaacagatggcagctgcaaggcaggccaggcacgggtctcagagaaaacgtcctattgggttcagggtttggatgcagatctataaatgtggccagaaaatccaaactagttccatcaaggagggtgcagaagccaggtgtggtagctcacacctgtattctccgaggtaagtggattgcttgaggcaaggagttcaagaccagcctgggcaatacagcaagacaccatctctatcaaaactaaaataaataaattaataaattagccaggcctggtggtgcatacccgtggtcccagccatttaggaggctgaggtgggaggctcacttgaacccaggagtttgaggttgtagtgagctatgagctgtgattgtaccactgcactccagcctaggtgacagagtgagaccctgtctcagaaacaaacaaacaaacaataaccaaaaaaaaaaaaaaaaaaaaaaaaaacagagaaggacagaggaagtcatttcggtgggccatgtctgttggatctcttcttcctggacacttccctgatttcttgcgtcaatctttttttgtaattatgtcgccttaacggaagaatatatccttcaactctgttgtaaacaaattggtattttctttatttctgattacggcctttgctttaggattgtatttctaaaaatatactattaccctgcttaaaacccatttatgcctggtgttccattattggaacgctaaacatgtgggagttatttatatcctactgctcgagggcatcagcaaggtctacatcttcacactgaaaaaattgtaaccacaggcataaatgggttaaaagcctcccaggatgccccatttttcctaggctaaaactccaaacactacagcgttggttaaggcttttgagccctgagttctataaacatttcaccctcatttgctgccagacacttataccacatacttctatcctcatatccatgacttggccatgttctgatgcagttttgtccctgggggttcccacctggcaaatccctcctcgatcattaaaactctgctaaaatatcactttccttgtgagggtttcatggactcctcctgggggttttaatcattttctcccagctgcttgagtggaagtccatgtgcatcacttataacgtgcttatgaaattgtaatgcaatgatttgtttatatggataattttaacctccagattttcaaaagcacggagaatgacttacccttctttctagcacaatgcctggttcctagttggcactgagcacacgtctaagctaaagattgctaaggatgtaacaatataagacaataatctaccctcaacactcaaaggtaagatgagaaagaggagaaaaaggcttccggattgaggtgattttatttcaccagacaagactaaggggatggagagaaaaggcctcctgaagtatttagggggggccgtgtgtgtgtgtgtgtgtgtgtgtgtgtgtgtgtgtgtgtgtgtgtgtacttgagagctggggaagccaagtaacattgagatgactgcagtctacaactcttaggggtcctgaaatcaggggaaggtgatattcttctcccaaacttggaggaggaaacccccggtgtccccacatcgcagttgtacgtggggatgcctttccgcccaccatgccagatttgcagagcacaaagagcattccgggcatatcagagcacatggctgtcacttctttgtacttctttcccaattatgtgtttggaacagagccctaaggacagttttatgcagcaaagggaacaaaactataagcagcatttgtcttacttgtgtgaaaagagctgttgcaaaaccccttgcatggttagatgagaaaacatagctgggcccctctgttctcaagcctgggattcctggacccagacctacgtggacccttgtcttgcagactgaggcccgggtgccagcctggcaaagtgtttttcagtgtcaatgcaattctaagagcaaatttcctttcattgtattgaaccctaagagctatacattttcctcaccctttcctgttctgtgttagcctggaaactcctgccagaagggatgtgagagctgagaaggcaagaacagcatttgtttggggctcatgggcctgtaagttctcatcatgaaacaatgacggactcagcaggttaggacctgtgaaatttaccaggatagaccaagccccaggctcagcatgtatcatgttttggggcatttcagttccatggaaatgatactgtgcagaagaaaggaaggagcaaactaaggaatgggatggaaaataaaagcaaacagttgtttatcatgtgttttcaacccaaagcatagatttgtgactcttatattcacctgcataatctctatcacttcaatttctacatattctagaatattaagacaaaactgtcctcctctctcctccccaccatatcaaattagacatttagataacatagcaaaagtaaaaaagtttgttgattcgcccaagtaattgacagtaatgaatttgttgctgagtgatgtggtttattgatggcactcgtatctcatctgctgtctgtgcttataagtacagtattggtgcttagcttgttgagttaataaaatctacaaagtggtttttaaaaaataatatgtactctaaagcaattctcagcaaaagcaactcccttcttacggggcgtgtgtgtgtgtgtatgtttcttaatcatcactaataacaagaaagggaaaatgtctgctttctgctgaatcgtttaagtggagaaacctacactaggagaaccttttgtcatcaatggttttagattctgggtggagcctggcccagttactgaggtcttagggcaaaggataacattaaacctttaagacccagcaagaccttacactgccttggggtgaagacgaggcagaccttctgtacctggttttgtgaggttcacacaactctttggtccccttcctgcctcaactcttcccttgtgcccatagaatagataacggctgttctttcaaaggatagagtcaggtgccagaatagagttggtgccactttgtaacctcctcggagaagtcacagcttgcaaaaatattgttatccatgttagtgaagtaattaaaatgaactaatcattttccaaaatatttatgtattgaaagcaattccaactgattgcctttaaatagcattttattctgttttcagtaataaacaggagcgtgcttccttttgctttctggagcgccagcccacccactgtggtgaagccgccggagtggtgtgagttgagtacaagttgcgaacagtgctgatcaatggcacggcccaaccttccaaccctgaaagagccccttggctgctcttgtcctcaggccagagccgttttgtcaggagctttgggaagagctaccattctgcagttactgtggaattttctccccaagtgggaatctttgtcagctcagtgctatttcctttatatcacagtctgagagaaccagtcgtctgattaaattaaggcaggcacacagacagttgggttgccaaacctagggatgttattaaaaataatagtgtttatggctgtgttgtctttgaaggtgcaagtgagacacatgttcctgccgtgtgggcagcaggttcctggcagtccaaacccgtggggacaagcaggacaagttatggagatgaaaaggcaggaaaaatgagtccacatggttactgtgttgatctggctgtgaggagggcaggggagacgaggagggcaggggagaccatgaggacaaggcctcctgtggcgaaaggcagagggaaggtgcagggacaatctctggtagagtaatagaatcctggttcttagacccagcttgaccctaactagctatgtaattttgggcaagcctgcaactgaacctcaattcatcggccttacctgtgaacaatagatctttaaggtttcttccaccagtgtcgctcctgaactcttgaaaaagaatccacaggcagagaaaaggaggagcagggtattctggtgaaaggtggggcagcatgaagcaggtaaactctagagacacatgttacactgtggctctgtccaccaattctgggagatgaagcaaacccatgtcctgggggcatggattttctttgagcagaggctggagagctgaggtctcttccttccctctccaggactgagtggacagtctgcctgctgcctttgcctctggcctgcccattgctgagcttacactctgctgggaccccagtctctgatccctctaaaggggccagtgctagaggttggacccaagtttctcccatgatgagtgctgctgtgtgcagatcagggcagcaggtccgggactgccacttccatcagacaggttctttctgaagttcaggagcattcgggagtgaatggagtcctttggaggagaaaggatcaagggcaacactctgtgaggttctttggatgcatataccatggtctcccatgctctgccctggctgttttcccagcatccctggtttttgcaagtactggcatgtgatggactgctgccagtgatggacagagatccttaattggttcctcattccttctttaactttgtccaaatcagcctgcctatttcttcatttacaatgtcctgccttcctgtcaatgtacttgcatttttctaagttcttgcaggttctttccaacccttcagaagcttgcatgttagtccttccattgccaaacagggttgtctatacagtgctgctacccaggcctttggaaagcaaattgtgcatccctaagccctaagccccaaacccaacagattccagtctccccacttgcttctgactcctagtgtgaacaattgtgatgacgctggtgtgcatcaggcaaaagccaggtcagattcttcccttgagactgataggaccatttattattagtgaatccaatagcaggccatctggagagataataaaggatggaattggaatggggttgagctgtaattgcagactcttaaaaaggatcctaggtgtgattttctaagtcaatgggttttgaacttaaaaaattagtggcacctttctacaaagagaatctcctcgcagtgcccaatatataaagcagatgaagtgagtttgctctggaagaaactgggtcggcctgatgcctggtgtgccacagctcttcccagaagcttttggaaccccctctgagccctggctgtggtgagcacacactgaatgctattcgtctaagctgacaaactcttctccaggcaaggtcattatgggaaatgcttagctaatttatatccatattgcttgagaatataatcatataccacattattaagcataaacaaaataaccctaaatcagttattcaaaattgcacatctagtaaagagtagaacagaaaccaggactgtgggcacctgacttttaggccaggactccttctcctaaaccagtagcccagacagtagccacctatcaccaggaatctgtcagaaagcagattcccaggctcaactccaggcctactggatctgaaaatgtgggggtgaggcccagaaatctgtattttaagaaggtctccaggtgattctgatgtatgctgaagaacaactgtcatggcctaaaccacgatgactcttgaatttccccattaatttataattttcttagtggtacatgggttaatatcttggaggtttttgccctcattgtctttatgtgtttattttggtagtgggcacaggaggtagtagggaagacttaaacatatacacaatgtccttcattatttactttgggactaaggttgtcagacttggaaaatgaaaatacagaatgtccagttatatttgttgtttggataaacaatgaaaactattttagtacaagtatgctccagaaaatatttgggacataattacactcaaaaataatttgcttttttatctgaggttcaaattcaactgggtatcctgtattttatctggcaactatatttggtacagatcatgaattaggaagtttcttcttttcatgtttttttttttcttcccttttctacacccaaagccagggacatatctcaatattgtgttcttatttccaaacccctttctatgttggtaagaaaaccagggggagagaggaactagagggtacgaatggtaaatgaacttaaccttcaaactcatcattttttaccattattatttcacttacacatttgctgcgttacaggaactgctgagtaagaagccatgaaaatctttgtcaaacacacggttgcctctccctgaactcccttctacccatcaaacaccatagcctgtctgccaccttcaacattggctgatgacttcttattttctactcactatgcttggggagccaactagacttaccagcaaaatcaggtgcatgtgtataagacacagttagactcaataaacagattcagtctaaacttccattgtgtgtggggacagggatggggaacatcttgggtgaggcaaagaaaggaccactggtcttaccataagattttccaaacaaacttgaacttttaaaataacttgatttaaaaatcaaaggaacagatttaaagtcttgtttttgatataatgtccttttaaacagaatttgaattaaagagtgggttggaagattgggaggaatgttagcagagaagtgcaagtggaaaaaaagataaaaataaatgttgttctcattatatccttttctgattgcatttggtggcgaaatgatcagtagacttgttttccagtctcaattcaatttcaatattagcacgtaaccttgggggagtcacaaagcctttcttattgtcaatcttttcatttgtacaatgaggatatttgtagaattagacaacctctagtttaatggctaatgaattgtatcatttttctcaggatctactaaactctcagatctttccattaatctgaatcacagcttaaactcatagttatcctgacaacctcatgacaagcaaaatatcagctgatcaaataccatttgtttcatctataggactgttcattaaacacaaaaaataatttcccccttatcttctacagcgaaaacctacccaaactgtgggctcagggctaactctaataaaataccatgttggactcagacccctctgatctaattagtataacctgtatttgatgtggaatgctttcctggctccagaaagaattgtattttgttagatattaagagacttgttatttagtattagtgggaactggagagataagttaattggtctagagcaaacttgaaggcagtgtgtagccctataggtatagggaagggtctagcccttagttctgacctggagtttgggttattctgaatactgtaaactctccagggaatttatattaaggaaaattagggctactgttgctggatgaaattattgatttagacggaaaatgacacgttcattattttaattgaggtgttcagtttggcaatttaagtaagggttgtaaaaatgatcaagaaataaggatcaaagaacctaaactatcataactctccaaaatccatctggaccagctctcttcctctaggaagatggggcctaatccccaagaaggaagtcagtcaatgattttctttcccttgatccacaacatgtactgctagaaagttgtattttatgtctcacctagaagtccctttggcagtgtaagcattttggaaaacagtccatggtggaaagtgtcctgggcttttggcagtttcctgacaagttttgttacaggtttcatttgctcttttaatgggatttttctctgagctattggcagtcagagaggttcagacaactggctgaacaggaggcatcataggatcatagaattgtagagctggaaggaactcctgggcttgccattcagacagcaatcattttgtcttaggttcagctaggaggtagcgaggccgggatgattgtatccaatcctttttgccacatgactagactgatagagacctttaaatgtcaacaaagcaattttgaatgggattcagagctcactaggaagctggtatcaaagctgtgatgttagaggactcatagaaaccaaacgccttgctgcatcccaaaggcagcgttttgcatgggcttcaggctgccacagctttatcggcatgtctgcatttgcagtgatgcatgctagaagctatggtgcagatctctgtcgccacatctgtgaaggtcagacgccacctagagatattcaagtctcctttgtttcccatcttccactcacagggattggtaacagttctttcaaagactgggctttaaggaattgacagcaggtagagagggaacaaacagcatgtgaatgcagagcaagtggtggaggccggcacagggattaggggcaccatgattaaattggcctcgaaagcccacacatccactcacagactagacatgattatgttcctgtttgtctctgtgcaaagccaactacttctaccctggtaggagtcactggagaggttaggagagataaaaccaaaatctagatttccctggtcagtctattgattctctattaaattgcaagaaatcaaaacagatcaccaaggttttgtctgtcagctgatgtttgtgtatcatatgtatgcaaagtctcagagccaggagggcctgtactccacaccaaatctcctatgcattaaaatcagggtggcgcctcatgaacacttcacctattgttctttcattgccaagtggggagagataatcaccaaggtacgcacttacaagaccagtctagagacctcacaagtcagggtgagtcgagcaactcacttgggtaagctttcatagatccacccatcttcccatttacccacccatctgttcattcatttatccatccctcaaaaaaatggctcagcctaccatgaactgagttgaagctaagtataccttggttaaaaacaaacaaacaaacaaacaaacaaacaaaaacagacctgggcttcatccttgccattattttatagtctagtaatggagtctagtcctcagtcttagagagaacagctaaactgctggtaaattatttgtctgattttcttaccttatatgtgtatgaaaatctgttattaggtgcaagtaaattggtgagtactaccacagtgcacatgatgaaataacggagaataagacaggggtagagggaggtttccataggtagaatgatccagagaagggcttctggagagaggacacctaggctgaggcctgaaggataagaagggaccagggatgaaaagagcagacagaagagcatttcaggcagagggagcagaatgaggggaggcagtgaggtgggggaatagctcagcatgtttcaagggactgaaagaagccatcgtggctgggctgggtaggtgagggaaagagtgaaatggaatgaaagggaaggggacagaagccacatcatgtaggtggttgaaggccataataaaaagtgggattttattttaagtgcaatggcaagacattggagggagggatggaggtataaaggattctttgagctgctgtgcccagaggaaattggaggagggcagtagcagatgtcgggaggccattacactcaaataaagtgagaaatgctggcggcttagactggagtgaatgtggggcagagctggctgcccaccatttttggagcactcagcctgagccatctgtgcccacgaatgctgttggaggattctgctaggcagccatcatcaacctgccccttcctttggttgttgggagtcaggtgatcagcaccaggtaccgtgtcctcctctcacgtagcaattgctcaatggcgtttcacgagtgatggtatagcaggctgcataatgagggaccatttgtccctaagggtgtctaggccctagtctctgggacctgcaaacaagatgccgcctatggagaaaggaactttgctgatgtggttaagaatcctcagatggggagttatcctggattatccagatgaacctgatgcaatggcaaaggtccttataagtcaaaggcaggagcaggagacctgatgatgggagaaagaggttggacagctgctatgaggggccacgagacaaagcatgcaggcagcctctggaggctgagaaaagggaggaaacagactctctagaacctgcaggtagaaccagctccgcagcaccttgaccttagcctaggaagactgctttggtcctcggcatttcagaaccgtaaggtcatagatttatgttgtttaaggccactacgtctgtggtgatctgttacagcggcagtaggaaactaacatagacagcaatgctgagtacattgtggaggcttaaggcccacttcactggcaagatctttctcttcacctccaaaactccatgttctagacccactgggagctagagactggctcccattctcatgcatccctggctctttcccttctgcagagcagccattgagggaattcaaggcttgggcatctggaagtgggtgggctcaggagacataaccaagaaaagcaaacaaaaaatgcatttgttttatttctttttcattttttataaaagtccattttagtcagtctagggaacaatggtgagagtgtcatgtctttagaaccagcatttgttggcaaatgcctggtctggttctcctccatgatgtaatgcctcctctgcttcacgcagaccacactctggagcttcccacccattctctagccttggcctttctcccttgccctctcatctctttctccagtctttcttcatcccaagcagatggagtgtgtacccttagacctggagtccagcacgcaggcccctgcgggtgtgagatgggctggaagcttgaagagaattcgacccggagggagaagcatgccatcttattaactgcaactttacttcaagaaatcacgcatttgacctgagatcagtatgtcctgtatctggctgcaatctgcctcctcccctggagcctagggaatggctgactctcatgcttcttgccctggatgaccaaaggcccttggctaatattttttctgtgaagcgacagggttcacctgtgcaagagaggacagaggcatctaagaagatttccaatcccgcctgcacatggcccttctcctgcctggaggccggtgtgcagccctgcctggggggagaggaggcatcagagggatgctgaaggttcctttggatcctttgaccttttcccacatagactctttttttgataccaagactaatgatctggtaaccctccagaaaggcatccaggaacaggggcttaattaggactcatttataggaagctactgcatatgcagttccagccggtttccctaagggcccatggaggagatgacggggaggtgacgtgggtcaagatttagactctccctttctcagaactgtctcctatatcctacctggttcatgcttcccatgctccacctcaaattttaaacaaagcaactgctgactaacctacatatctttattaagaactacccaccttagcctagggagatgcatatttagcattgtgattatttggggttagctattttcttcttatgaatacacatgaggattttccttttcctcgtaactttgttatggtggctgccttgctaataagggttgtgcctgtaaatgcattttacttccataattattgggggatttacatgctctctggagatattaactgttctgatgtcctgtgagtaggcagtggtcaggagcacaagcccgtgaagaatccgtggatggaataacactgagagtttgcaagttcaaatctgagccctgcattttgtccacaacgtagttaacttgatgtaggcatcccgtctactttgcctgatggaggaagggaaggggtgtggtttattttgtctgagcacaggagagctcaggattctgataggctgttgcagggatagctgggacatctgagaacagtcacatttgaatgtttcagaatatttcagaacttgatgcctggccaacttcaatctgctgcctgccttcttcctcctctgccagattctccatcacacccttgccggggtctgaatgtgtatctcctccccacaaggtttcccatcttcagtctgattacagaatattaccactggaaccaggtgcttggaagtcagtgttagattgagaaatgtatgtcacgtacctgagtctttaagggagccattagtttttgatcaggcgcaaattaagtagaaaatcagaagcggcaaagtccttctggaatctgctctgtgacaaatttcttgggcaaatctcagaatcccccaaattaacaagcatctttcaaagtaaattgggccatcctccccgctccaaatcatacagaacctgagcacttctagacaactatctgggcaggaaattgtatgagagcacttttccctctcccgcccttccaaggaatgtataccagtataaatcaagacgtcagcatgcaggaagtcattgcagatggctaattttactccttcctcctacacttcaaatccacttgcttatctgatgcattttacatgtgagatttatttttccttctaaattttaaatagttgttgaatattgagggaatcatcagcttaagatcagggactatatatcttcctgctcttgtttctactttataaccatgaatgaagtagtctgcaaacagaaaataatcaataacaagatctacttttgctgagcatttattatgtgccaggaattgtattagatgccctacatctttgctacacaaagtgtggtgccaggactatcagcattttcatcacatgggagctttttagaaaggcagactctcaggccccatctcaaagttgaacaagattcaacatttgaacaagatccttagattatacatatgcatattatagcttcaaaggtgctgctttgcatcctttcacttattacttagagtaactctaggatgtaggacctattgcaccactttatagatgagaaaactaaggctctggaaaattaaacaagttgcctaagatctcaccaactaagtgtctgataggggatttaaattcaattttctgtttctccatattccatgcctttctagttctgctatgatgagttagaggagaatccattcatagtaaagattcagcacccccaaacatctgcattctctaagttttgaagttttctagaataaggctgatgtcgttaaactgtttaaaggtgtggacctgtaggacctctactagtgtgtgtagttcatttattcattcacacaaaacatgctgttgttgctgagcttcttcctattggtaagtggtggcatgataggtgcttccaggggcacaaagtcgactaaagggcttggtgcttgcctggaaagatgtttgttgctgacagtcgtgaaaaagctagcagccccgagaccatgagcgctttctgatgtcaactcagaatccgcaaaagaggcaggctgcctggaggtcaacaaatccaaactgacttgcaggtaataaagtatctcgttctgtctgcattgtcagtcagggtgcagcaccttccatctcttatctaggaagggaactgtagacagcaattccagttcctccagtgacatcagcagccagactctgcattccagcacacattgctcataagtagggtgtttccatttccccgaggcttctttaggaggaggctacaagtggtgcccacctgaccagctggttagggaggtaaccctgtgtgtttaacttccacttcaccctcccttctgagtggagaatgagcttgaagctgccatgcaaataaactctaatgactttcttcttgcatttacattattaggcgttcctttgactgacgttatgatgataaatgaaaaatgccttgcaccattacatcaagcactaatgcagaataggaagaatttctgctctctcacttattttagggaaagaaaggaaaaaaaagaaagaaaatagcagatgggaaatcaattggatccctatgtcctgctaaggtatttgcatacaggctgccaggagctcagtgccactcacactgcactggagacagggtctgtgtctcttccttgcctcttctgtactgcaaagtctgtgccagctgaatttcagtttctcagggatgtacgaaccacttagacccatttgacaggcaggcaaactgagttatgcaccttcctcaagttatttcagataaatgcctggaggatctgattgacctgtgaagcagcatgtttatctcagcaggagcatgctgataagttaccgtctagtttgcaattgcttagttgttttttatttcttttcttttcttttttttttttttttttggcgcaatcttggctcactgcaagttccgcctcctgggttcatgccattctcctgcctcagcctccaagtagctgggactgcaggcacccaccaccatgcctggctaattttttttttttttttgtatttttagtagagacagggtttcaccgtgttagccaggaaggtctggatcttctgacctcgtgatctgcctgccttggcctcccaaagtgctgggattataggcgtgagccaccacgcccagctttttttttttttatttttttattttttttgagacagagtctcgctctgtcacccaggttggaatgcggtggctcgatcttggctcattgaaacctccgcctcctgggttcaagcaattcttctgcatcagcctcccaagtagctgggattacaggcacctgccaccatgcctggctaatccttttgtatttttagtggagacagggtttcatcatgttggccaggctggttttgaacatctggcctcaagtgatccacctgccttggcctcccaaagtgctgagattacaggtgttagccattgcgcctggctagttgtctccttttaatgtgatatttgatacctcttggagtgtttgtttttggtttaggtgggctgagaaataattcaaatgaaataactgatgtgcaagtttctgtgcaatctctggccatagtttcccaaaaacgccctatagttcctgccgcgagttacaaaccctcacacctaaacagtttggcttcaggtgcctcaatcaatagcagctctttgatgttaaggctcaaagacactaaagcaaataatatacacattaaaagcccaacaacatgataacgggaacttagaactctgagagaggaaaaagtccaaaggcttccctgaagccagggtcgaatattggctatccttcacaatcactaaaacaacatattgataagacacagccaagttcatggtttctggcactaaggaaagccccacacctgcatagtgtcagtagtgcctttgagggagaagggcaaagcaggatcacttaggagattttgaagcctggtttaaggcaagtctctcaatgcaggagctagggagggggctgatcagtatctataggaatcatgatgtaatcatgtaggatcactggatataaagagtttgggggtagaaactgtcctttaattttttttttcttttttggtagcttaatgggtctttcggtaagttcttgggaggaacaataaagttatttgcaactgttatcttcctgggcagtagtagagttgtgttgaggaagacagtaaaatagtcaagacttgttaatgtagctggtaatgtgtgcagaaatcttggactctcaccaggcgagacatgaggctgatagtggtggagatgctttctggaggtggtgaccaatggccacgcctgctgggaggttgccagtgtcccactttgggaggcatcactgagggctggggggtctttgaggcgtatgcttcaagctccttgtcctcattaggccaagaggtcatctttcccttcagattcttctcaaccttgctgaagactcctagtggccataatctgggtgtcaggatgaagtctgggaactgagtgcacatccctgattccatacacacatttctttgtggaccccttgagtgaggaggacagaaatcctgctccaggacagtggtgggaagggtggctgcacaggggttaagagccatgggaagccagtgcatccccacaagggcacgaccctgagctcctccacacacccgaggaaccctgcttttagctcaaaggagccccgtatgctgtggagaattcctctgctaccagcctctgagaagttgtactgagcaactgtgaataagaaacaattaaatttgctaaaggtctgcgaaatcagatctaatctctttggggacttggaaaaaacaagcaaacaaaagagctgagttatcgattgctgcatttcggcggctcttaatctgaaatgaaatcaggacccaaaggccagagaccccgatatccattctgcacttgtcggaaggcccacctgtcagagcccgaacttctgctcaatggctaaattagtaggcaagtggcaggttgcagagagctgtggccattgggctttcttggggcacgaaagcggaggaagagctggcatattttcttaagtgtaaagcagtggagtaaattgagttcactgggtcaacattcctcctcctctatccacagaagcacctcacccaatcagcagactttctctccagccttagatctccctcttatgagatgctgtcattctattatcctcccccaagttggtctttacccctttgaccttcagaggtggagagggcaggagggcaatggttctggtggtcaggggcttgccaggaaggagaaagatgctgaccttgaataaacgacatatgtagctttcctgagttaggttgcatctgggatgcagtgaaaggtagcagcagtctcgctgtggctgtccagtccagaagcagaagaccggcacctgagatatcaaggtatccaatttgggaatgctttttctgtgggtgtgtagaattgcaggaaagaccatagcatattccctgaagtgaacccaaataaggtctgggataaaaaatctgaatctttaggcattaactgtgaaaatgtctagtcagaatgtctttaaaatggcagcttctcttatcagtgtatttgtgctgagaaaaaaaaataagtatagcttctcagtttaccttctctgatccagggacaagaaagaagaaaatgaccactacctcttcttaataagaccccttgatctctacactctccagaaaaccacatcaggatttacctcacagggtggacaaatctgaaacattctaaataaaagtttgaaattcccattttgcagtaaatgtgactgggcctcccttaatgcctcctgtccctcggtgttctacctgtacttcccacttcacctggtgtctcagctaaacttcttgaaagtgggtctctaagttttcagttatcgtgtattacacagttcattgcaaatcaacttccatcaggacatgtgtcaaggtcaaccatgaccttaccattgactcatcttttcatttcttcaacacagttgctttgaagggttggcatgatgggcctccatccttgaagtgctttgcaatcttgacccccaggtcgctgtattcctctgctcctccttctgcctccgtgaaaacccatgtttgcttttcttcttttctctgagctaatatcgatatctgttgaggtttcatccttgtctctcttttacatgtcgacataccatctgggtgatctctttattacatgacttctactctcagtttcacaaagatgactctgaaatttacatctttcaccagatctctcccctgggatcgaggttcatgtttccacctacccattaaacatgtggacttgaatatgcaagaggcctctcaaactcagtatgtagaaaacgttattctcaaaccttctcctccccttgatgttattattgggatcgatagcatctcaaccacctggcggcccaagctgaaactgttggtacgcctgtcactcttctctctgcccacctccttattcagtgtaagttcacacttcttagctgagcacgtgaacatcaccgtaagttggccaaaactgcctttccaggctgcacctgcatccaacctgggccagttttctacacttgcatatttcctccctacttcttgatttatctacatatatctactatgtgtggcctctttcctcttccatgccctcagtgccttatcctatgagacctgctttggatggtggccctcttgcatgccctctctattctcctcaatggacctggccacctcctcgtggtcactcccacacgacatgcttccccctctttgtgtcacactgtgtgtgacacatctgtcttcatcccctagacttgaggaaagaacaggaagaaattaatactttaatctttgtatcatttcaacctcttagcacaatttctgacacatagtagagcctcaaaaaaacctggcctgataattgaataaatgcttggattagaaataaattctgggggtgatggctcacgcctataatcccagcactttgggaggctgaggcgggtggaacatttgaggtcagaagttcaagaccagcaaggcccacatggtgaaaccccatctctactaaaaatacaaaaaaaaaaaaaaaaaaaaaaaaattagccaggcctggtggtggttacctgtaatcccagctacttgggagcctgaagcaggagaattgttcgaacccaggaggtggaggttgcagtaagccgagatcgtgcagctgcactccagcctgggtgacagagtgagactctgactcaaaataaataaagaaattctgctccagactaggtgagtcataaaagtatatatggttctaccacagagccctcacctgagaactggaaggtggtgatgctttgcgtctgatttttaagggattgagggatggtgacaagaaaactgaaaatgaacgttgtgattccctaagcctctcaggagagagatgccaagggagggggtagctgccttgtaaaagagttcaaagagcataggagaaatggggagaacacctgggttctccattccttcacagtgtgcacaaggaccccccgcccagcctcagggttctatttgtaaatagggtcaagagacccactctaccaggttgttgcgagaactcagtgagtgccctaagtgttttcacagtcatttaggaacccagatttgagtgtcattactttttagagcaatcatctgtgatgctaatgataatgatgcttgtgaaaaaaataagaataataaggacaaaaagtgacacacaaataaatagctgtttatctcgcataggagtggggaaacaaatgaaaatattggagaacaccagagccacttaaattgacaactctggtgtttccatatatgctatttgaacacatccagctgggggtctctcgtgcaaacaaatggtaaagaatgcatttttttcctgtctccatatcaccagggttttctgctcacacagtgttgcgctaattgcatattcagtaggatttataatgcaattatgaattcataccataaacgtttcctggtctcctgaaatagcttgcatttccttcagatgtgtcccaaggcactctgatcttacccttattatggcactgacattgtaattgttggtttacttctcagtctgtcccaaatattattggagctttaggacaggaactgtatcttgttcagtatactcctgttacctagtgtcgaatgaagcacttaagttttgctccaaagctatttgctggcctttactcattcattaaatacctatttgtggagtgcctgtcactgtgctgggcgctgggatatggcagcatcaaccatgttcactcacagagactatagccaggaagggagtggccatacagaattatttaatgaacgctgtaataattgcaataaaacaaaaatacaacatgcttaaggcatgtacaagggtcccaaccatgtgtgaaggcataggtagttctttgagaaaagtatatttttaaactatgaggaagacttatccatacaaagagttccagggatgggggtggagctaggtgggtgaaaggaagaatccagaatgactgaagagcagaaaatctaggatgggaaggtatatggactgctgtgatggccacacatctgaaatccagggaggtatgaggacttgctttctccaggttccaagtccattaatagcagaataaggactggaatccacagctttttctcctgggccacactgtaaacatacagctgtggttaggaaaacgagaggaagccttgagtgatgagagagtgacagtgggcaaagatccagactgattacacaaagggaagaggcaagttcaccctgaaagttgcatcatgttcagtggcactccatgcttcttcctgagccctggcacttgtgctgtaccttatcacagcactccagcagggctgacaggtcctctgccccccaccatgggccttgcctgttttcctctgttggagggtctccctgcaggctacagcagccaggacctttctgggccacacagtctgaatgacctgctcttcctgaatgctctctcctggcagcgttctgcgggctgccgccctaatagcctgtctccccacaggccccaaacatgttgctggatcagagttagtatctttcccacccgccaggctgtcccccgagggactgccgtctcctgcaagctgtagggagatatgctacggtgattcatattagcttgatttgcagccgttccacacagtgtcgcagagacctgcaaaatccccacagtcttgattaggtttgccttttgctgtttatcagtggtacctgtctatttttatagccacccttcagccaaattcaggattgcagctttcacggtgggaatcattccctggtcatgtgcatctctcattcgggtgtcttgtgggcagtgggagaggaaaggaaagcagaaaggatgcccgaggggaaggtatttgacattgtgagggctgcttttctggtgagggcaccggtccttggtattctcttcctggccaaaacatctccctccttagacccctcacatacttaaacttagttgagttggtgggtggacaagatgacaggcagatgatgagataaaaagataacattaagcgcattcccaaaatgccagaatctctaggcagaatgccaagttgtcctctcacccagtgcccacctctgcatctcaggttaagagagtagcccaggccagtgatctgcttacctgcttccctccacaaggaagaagctctgggcagcagagactctcgtgctcatgagccatccccagcccccgtgtggctggcccaacatcactcatgattgcagtaaatatttaccttctcatctgttgctcacaaccaccctggatctggataaagtcattttggcttctatgcccatttcacagatggagaggtgaccctctcaaggttacacagagcctggagccaagcgtgcatctcctaatgtcacagccactgggtgagggtctccttgttatcccaacccagctcccagggagtttcctcacagtccagcaaagaatcccactccctacccctccccatcagacactcccccacacccaaccaccacgcaaacttccctgtttggagtggtagagggagggatgataaaaggtataaaagaatgaaacattcttatgtttgatgattcctatttgatgaatgaaaacaatatttaatgagtgcaggaggttttgaacctacctaaaatggagggaagatttagccctctgcatttccaagacctcatctttgtcctgtgtgaattcttaccattaatagcaaaattgcagacagggggagtactacattcctccttaagaagagaatgccattgttgacatgggaagatggttcttgagaaggggttggaggtaggcaagctcatttgttctttattccccgccagtccgtgaggaaatgtcagacaacaagacctatcccttcatggactccatagtttagtgagggaaaaggatattaagtaaataattatctcattacaaattgtgatgagtgctcagtagaataagtttctgtgtgagaaactgacagaggatcttctttacattggaggatgttggggaagacacctttgaggaagtgacagttaacctgagatgacaaagatcaacgctgcctggttaagtctggctaatgaattgttcaagaccacatggttaggacaactgagacacagtacagtggggctgcggggactaggggtcagaggacctcaagtctgaaacttaaaaaatcgtgtattttttgtgaaaataattaaatatcaatagtactacaagtgtaattttcaaaagaaaattgactttactctcctcatccaagaattccattctccaaaggcaaccattttcagctctcacctgtttatttggatatttacctccagatttctcagtaatgtgtttatagagttacttcataaattctagacattcatctactacaaaagatgaagatttagcattcttttttttttttttttttttttttttttttttgagacggagtctcactctgtttgcccaggctggagtgcggtggcgcgatcacagctcactgcaagctccgcctccctggttcatgccattctcctgcctcagcctcccaagtagctgggactgcaggcgcccgccaccacgcccggctaattttttgtattctttttagtagagacagggtttcaccatgttaggcaggatgttctcgatctcctgacctcgtgatccccccgtctcggcctcccaaagtgctgggattacaggcgtgagccactgcgcccagcctagcattcttaaacctgtcccatcacatttaattcttccattttcctaatagatagttttacatgacaattattctttgaatcaattgtcagtattcaaattataaatattaatgcaaataaaaccaagtgaattatgattacattgactttcctatacaacattctgtttttcctggagttacgtattttctgtgtatgtctattttttccccacagttttcccattttcctgctgccatctggaactcccatcaccactaaccaggcctctctcctattttggaatccctgcctccagggcctcatgactttttatttatttattattatgattatctttaaatttctcttgtgttttggaagagtgtacttttcagttacttcctgaggaaagggtaagcaacttgcttcacacatgactgttagtttgattgggtttagaattttcacctcagagtagttttccttcagaatgtcctctattctctaacttccatggtggctctttagaaatgtgcctctctgattcctacatctttgtatgagttctagatatttttttttccttaggaagattttaggccactctttttatccctgctattttggagttttcttaggtatacaaggtgttgatacagactttttaaaaaattatactttaagttctagggtacatgtgcacaacgtgcaggttgttacataggtatacacgtgccatgttggtttgctgcacccattaactcgtcatttacattaggtatttctcctaatgctatccctctccctatccccaaccccacaataggcaccggggtggtaggttccccgccctgtttccaaatgtctccattgttcagttcccacctatgagtgagaacatgcggtgtttggttttctgtccttgtgatagtttgctcagaatgatggtttccagctgcatccatgtccctacaaaggacatgaactcatcctttttatggctgcataatattccatggagtatatgtgccacatgttctctatcatcgatggacatttgtgttggttccaagtctttgctatcatgaatagtgccgcagtaaacatacgtgtgcatgtgtctttatactagcatgatttataatcctttgggtatatacccagtaatgggattgctgggtcaaatggtatttctagttctagatccttgaggaattgccacactgtcttccacaatggctgaactaatttacactcccaccaacagtgtaaaagcattcctatttctccacatcctttccagcatctgttgtttcctgactttttaatgattgccattctaactggtgtgagatagtatctcattgtggttttgatttgcatttctctgatgaccagtgatgatgagtgtttttttcatgtgtttgttgactgcataaatatcttcttttgagaagtgtctgttcatatcctttgcgcacttttcgatgaggttgtttgttcttttcttgtaaatttgtttaagttctttgtagattctggatattagccctttgtcagatggttagattgcaaaaattttctcccattctgtaggttgcctattcactctgatggtagtttatttcactgtgaagaagctctttagtttaattagatcccatttgtcaattttggcttttgttgccattgcttttggtgttttagtcatgaagtcctcgcccatgcctatgtcctgaatggtattgcctaggatttcttctagagtttttatggttttaggtctaacatttaagtctttaatccatcttgaatttatttttgtctaaggcgtaaggaagggatccagtttcagctttctacatatgactagccagttttcccagcaccatttattaaatagggagtccttttcccctttcttgtttttctcaggtttgttaaagatcagatggttgtagatgtgtggtgttatttctgaggcctctgttctgttccattggtctatatatctgttttggtaccagtaccatgctgttttggttactgtagccttgtattatagtttgaagtcaggtagtgtgatgcctccagctttgttctttttgcttaggattgtcttggcaatgcgggctcttttttggttccatatgaaccttaaagtagttttttccaattctgtgaagaaagtcattgggagcttgatggggatggaattgaatctataaattaccttgggcagtatggccattttcacaatgttgattcttcctatccatgagcatggaatgttcttccatttgtttgtgccctcttttatttcattgagcagtgatttgtagttctccttgaagaggtccctcacatcccttgtaagttggattcctagttatttgattctctttgtagcaattctgaatgggagttcactcatgatttggctctctgtctgttattggtgcataggaatgcttgtgatttttgcacattgattttgtatcctgagattttgctgaagttgcttatcagcttaaggatattttgggctgagatgatggggttttctaaatatacaatcatgtcatctgcaaacagggacaatttgacttcttcttttcctaattgaataccctttatttctttctcttgcctgattgccctggccagaatttccagcactatgttgaataggagtggtgaaagagggcatccctgccttgtgccagttttcaaagggaatgcttccagtttttgcccattcagtatgatattggctctaggtttgtcataaatagcttttattattttaagatacgttccgtcagtacctaggttactgagagtttttagcatgaagggctgttcaattttgtcaaaggctttttctgcatctattgagataatcatgtggtttttaacgttggatctgtttatgtgatggattatgtttattgatttgcatatgttcaaccagacttgcatcccagggatgaagctgaattgatcgtggtggataagctttttgatgtgctgctagattcgatttgccagtattttattgaggattttagcattgatgttcatcagggatattggtctaaaattctcttttttttgttgcgtctctgccaggctttgctatcaggatgatgctggcctcatgagttagggaggattccctctttttctactgagtggaatagtttcagaaggaatggtaccagctcctttttgtacctccggtaggattcggctatgaatccgtctggtcctggactttttttggttggtgggctattaattattgcctcaatttcagagcctgttattggtctactcagggattcaacttcttcctggtttagtattgggagggtgtatgtgtccagaaatttatccgtttcttctagattttctagtttatttgcgtagagatgtttatagtattctctgatggtagtttgtatttctgtgggatcggtggtgatatcccatttatcattttttattgcatctatttgattcttctctcttttcttctttattagtcttgctagcagtctatcaattttgttgatattttcaaaaaaccagctcctagattcattgatttttttgaaggggttttgtgtttctatctccttcagttctgctctgatcttagttatttcttgccttctgctagcttttgaatttgtttgctctcgcttctctagttcttttaattgtgatgttagggtgtcaattttagatctttcctgctttctcttgtgggcatttagtggtataaacttccctctacacactgctttaaatgtgtcccagagattcaggtacgttgtgtctttgttctcattggtttcaaataacatctttatttctgcttcatttcgttattttacacagtagtcattcaggagcaggttgttcagtttccatgtagttgtgtagttttgagtgagtttctgaatcccgagttctaatttgattgcactgtggtctgagagacagtttgttgtgatttctgttctttcacatttgctgaggagtgctttactttcaactatgtggtcaattttggaataagtgcgatgtggtgctgagaagaatgtatattctgttgatttggggtggagagttctgtagatgtctattaggtccacttggtgcagaactgagttcaagtcctggatatccttgttaaccttctgtctcgtcggtctgtctaatattgagagtggggtgttaaagtctcccattattgttgtgtgggagtctaagtctcttagtaggtctctaaggacttgctttatgaatctgagtgctcctgtgttgggtgcatatatatttaggatagttagctcttcttgttgaattgatccctttatcattatgtaatggccttctttgtctctttttatctttgttggtttgaagtctgttttatcagagactaagattgcaacctctgctttttatttgctttccatttgcttggtagatcttcctccatcccttaattttgagcctatgtatgtctctgcatgtgagatgggtctcctgaatagagcatactgatgggtcttgactctttatccaatttgccagtgtgtgccttttaagtggggcatttagcccatttacatttaaggttaatattgttacatgtgaatttgatcctgtcaatatgtcagctggttattttgcccgttagttgatgcagtttcttcctagcattgatggtctttacaatctggcatgtttttgcagtggctggtaccagtttttcctttccatgtttagtgttccttcaggagctcttgtaaggcaggcctggtggtgagaaaatctctcagcatttgcttgtctgtaaaggattttatttctccttcacttatgaagcttagtttggctggatatgaaattgtgggttgaaaattcttttctttaagaatgttgagtattagcccccactctcttctgacttgtagagtttctgccgagggatcctctgtagtctgatgggcttccatttgctgttaacctgacctttctctctggctgcccttaaaattttttccttcatttcaaccttggtgaatctgacaattatgtgtcttggggttgctcttcttgaggagtatctttgtggtgtcctctgtatttcctgaatttgaatgttggcctgccttgctaggttggggaagttctcctggataatgtcctgaagagtgttttccaacttggttccattctccctgtcactttcaggtacaccagtcagacgtagatttggtcttttcacatagtcccatatttcttggagactttgttcgtttccttttactcttttttctctaaactttgcttcttgctttatttcgttaatttgaccttcaatcaccgataccctttcttccacttgatcgaatcggctgttgaagtttgtgcatgtgtcacgtagttctcatgccatggttttcagctccgttgggtcatttaaggtcttcttcacactgtttattgtagttagccattcgtctaatcttttttcaaggtttttagcttccttgtgatggattcgaacatcctcctttagcttggagaagtttgttattactgaccttctgaaggctacttctgtcagctcatcaaagtcattctccatccagctttgttccattgctggagaggaactgcagtcctttggaggagaagagacgctctggtttttagaatttttagcttttctgctctggtttctcctcatctttgtggtctttatctacctttactctttgatgatggtgacctatagatggggttttggtatggatgtcctttttgttgatgctgatgctattcttttctgtttgttagttttccttctaacagtgaggtccctcagctgcaggtctgttggagtttgctggaggtccactccagaccctcttttcctgggtatcaccagcggaggctgcagaatagcagatattgcagaacagcgaatattgcttcctgatccttcctctggaagcttcatcccagagggtcatctgcctgtatgaggtgtcagtcggcccctactgggaggtgtctcccagttaggctactcgggggtcagggactcacttggggaggcagtctgtccgttctccaagctcaaacaccatgctgggagaaccactgctctcttcagagctgtcagtcagggttgtttaagtctgcagaagtttctgctgccttttgttcagctatgccctacccacaaaggtagagactacagaggcagttggtctttctgagctatggtgggctccacccagttcgagcttcccaggatgctttgtttacctactcaagtctcagcaatggtggatgcccctccccctgccaggctgctgccttgcaggttgatctcagactgctgtgctagcagcgagcaaagctctgtgggcatgggaccggcctagtcatgcacgggatataatctcctggtgtgctgtttgctaagaccattggaaaagtgcagtatttgggagggagtgtcccgtttttccaggtaccatctgtcatggcttcccttggctaggaaaggaaaatcccctgaccccttgagcttctcaggtgaggcgatgccctgccctgtttcagctcaccctccatgggctgcacccactgtccaactagtcccagtgagatgaaccaagtacctcagttggaaatgcagaagtcacccatcttctgcattgattacgctgggcactgcagaccagagctgttcctattcggccatcttaggcttttttttttttttttaactactctcctttgtacttaatacatttctcttctatcagttttgaaaatgtatcttgtggtatttattttttaattttctcctcttattttcttgttttctttctggcagttttttaaaaagatgttttattattttctgtcatttatattttctatattttttgttctgatttctaggagagttctccaactttatcctcctatatttaaaattaatgttccttaaaaaaatttaacctataacttcttttaatttctaggagttctttattattctctgcttattgttatttatttatttttctgttgagaggtgggtgctaaaaagccctttggaagctctacacataagtttgttgactcaagggcttctctttaggttaagtgggagctacacattttggtgaagatccctcaagtgtcagtaattttttctgtattcttgtgggtggctttttcagagaaaacttccaatctgcttaagttcctccttttctgactctaccatgctttattaccaagtggttctcaaacttagacatgcatcagaatccctggggagcctgggacaacacagtctgctaggtccctgccccttcacactttctgattctgtaggtcttggatggcccctgaaagtgcatctctaacaagttcctgggtgatgatgattctgttggtttgggaactacatttttgaaaaccactactctagagaataagctctctatctcttcccaggaaagcagtttagctctcaggttccacagatgagtgacggaatgtaactcttcctcatacagactttcaacagttgtcttgttttttgtgccacccctcaccacagcctccataaaaaaaaaaaaaaaaaaaaaaaaaaaaaaaaaaaaaaaaaaaaaaaattcatgcccgtgtctgggggtttgcagcctgaatcagcttgcttctcctccccaggcatttcagtttttgctttccctgctttgctgaatcagttaccattcattcatctgctttccatcctatacaattttgccaacgtgtttcatctgctgatgttttctctcattttatttgtctatatagattgtttaaaccattgttttaaaggggtattgggaggaagtagaagttaatccagttcttcaggccactgtaattagtcatgtcaggaattattttgattgcaagccattgtctttctttcctatattaagcacagctctttttggtcatgcagttagaatgagctgatgcgtctccaaccaaagcccagagaccgtgaatgtgccattatcctaatcatgcaaagcactctcatttctattcttgctgagggaggaatgcttcccagaactaaattcctaactacggaaagaagaaaaggcagtttgagaatttcttgactgtttggaaattttttctagcacaacaagctgtttatcctttactctgattcttattgaattaaggaaggagaaaagaaatcaattcactctccatatgctgcacagcaaaaaccaccactcacaacactatggaatatgtagggaaggggaaaagaagataaatccatcaactaacaagataagtgccttgttcctccatctgttactgctgtgtccttatctaggattggagcatggcagctccgatatatctcgtgtcaggtattatattccaaacccatatgaatgaattttcatgctagtaaccatccatgatctagcccagccacagctaaatttgtcctaaggcaccaactgtcttttgcatttggaagtccattgaattcacagactggaatagggttgtctgctgctgccagaggatggtatctctctgtagcttttccagcacggctgtctctgttgtgctagagctggtgctgatgacttacttgattcactcctgaggaagtgctgatgttcttccaggagatagggaaaacactggaggcctggagaaaatgtctatagaaggcccatagatgggtacatcaacaagagattgaatcattatttaggtgattgattagatgcaccactcctcagatcacagggtaaaaattcagaagactgttcaattggaatgatatctcacgctcttcagcagccccaattatgcggagatgatttcctcattcacaaacagtttattttcaggactgagccttaactgagcatccaggtgcagaagcggagatgatgacatgtggcatgggaacccgtgattgtggcatttttgacaagggctgaaagtcgcagtagacagataaaacttgtttgcatccgtggttgagactgagactcacattttattatagcaattgtgtgatccatctatgttaacatcactgtcttcatcatcctcctcatcgatgacagcaatagcagcagcagcagcagcagcaatacaacagaggggacatgacagctttcagtgcatggtcaaattctttttattttattttagattggggttgtacccatgcaggtttgtgtcatgggtatattacataatgacagggattgggcttctagtgtacccatcaaccaaatagtgaacactgtacccaataggtaagttttcaaccctcatccctttcccatcttccccccttttggagtcccaagtctctattagttctgtctttatgtccatgtgtacccattgcttagctcccacttataagtgagaacatgcagcatttgactttctgtttccgagttatttcacttaggataatggcctccaggtcatccatgtcactacaaaggacataatttcatcgttttatggctttatagtattccgttatatatatacgtgtatatattatatatatgtgtgtgtatatatatatatacacacacagacacacacaaacaccacattttctttatgcaatcaatcattggtggacacttaggttgattctgtgcctttactattgtgagtagtgttgtgataaacacacacgtgcaggtatcttttctatatataataatttcttttcctttggtagatgcccagtagtgggaatgctgggttgaatggtagttctatttttagttctttgagaaatacccatactattttccatagaaggagatattcttacctgtttccatctccgtcttcagaacttgagggcatctaatacacagtacgtgtggtgagctgaacagggtaagctagatttgctgcagtgtttaaagagagatacaatgagtaactcaactttataagtggtagagcactggaaagaagggaaatgggttgaaaatatttagtaacaaaattcaacaatgaagactggccatattgtaacagaataaagaagagggaaagaagaagcttgtcttttccatttcaagctagaatgcctgggtgtatggttgtatcatatttggagaataagagaaaagtcggtcatattgcagaagaaaatatattttcttggaatatactgagattgaggtgcctgtgaatcatccagagaagcctgtcctgcaagtagtgagtacatgagtcaaactcaagggagatgcccaaggctggaaatatatgcatcgagccatcagtgcacaggtggtgtggtaggtcacccctaagacagtccccagtggtccccattgactgatctccatgccctgtgttattccctttcctaactgtgggctggacttatttattcaattttaatgagtagaccacagaagcagctatgggaactcacttccaaggttatgttataaaagaagagtgacttccatcttaagatgtctttatctgtccttcttgaatcacttgccttggtgaatgccaacttccatggcatgaggtgtcactgtgcagagacccacccacctgccaaggaaacaaggcctgtaagaagcatgtgaataagcttggaggaagatacctccatacctacatttgagtcttcagataaaactatagttccagatgacatctttgctgcaacctcataagagatcttgaccagagacactcagctaagcctcattctgcttcccgacctacagaatctgtgagatagaaaatgtttgcgttattaaattgcaagttttacagtgatccgttacaaagtaatagaaaacttacatagttagttaaaagaatgagaatagttgagagttgagctcatttaagaaaaggtggtagagaaagggaagtcaaaccctgatgctcaacagtggctaaaggttagaaccaaaaaaaaaaaaaaaaaaaaaaaaatagaagccaatatgggggacagaaagaagaaatggaagaaacaataagaatgaaatgagaaaaagcaggggcaacttgacattataaaagtccaaggagtgcgtcttatggaaagagaaagaaaagggatcagattgctcatatcaaatgctgcagatggttcgagtaatacaaggtttgaaatgacctacaaattttgcagttaggaggtcttgggtgatctgactaaaagcagtttcaatagaatagggaggatagaaactagagagttggggcttgagaaatagaaagggaaagagatcatggactatgttttgagaagaatgaattgaggaaggaaggagaaagattggatggtgaagaaggtcatggcataaattgagggctttgcatggaaggttcttgaatgtgtttatgactatactagagccttaagaagtgtggttgtggggggtgtggcacagaacatttaggttaggttaaagatgaccaacagaagaaagccatgatacagaaagagtggagaagttggggtcaaggatacaagtggaatcagttgatctaacagggctttctgttggctaagactggagagaagatgtaagagaaggttatatgtgggtacaaatgtgtttcctggaaggatgatgagaaatagtgagattacattagaccttgattttctcataaaatcaggaaaggggtacgtatcaaatcagtgcttctcaaacttttccataagtaaatatcttaatgagagagaaaagtaagtgcatatccatagcaacctgaagtcatagtataataccaagaagtcagcagcaatattggaatttcacatcaattattaatctatcctatttgtatgatgatccttattatagccatttttaatataaaacattttgaattagtgataatatttaactttcctcccaaatgattagagcacactgcatgcttctgagagctgcattgtatttctcctgtggcatttgtatctccgtacactgccctgtacccctaagggtatgtatacagccatgcagagacccagctttacactatcagcacccactgacacatttgcacattcagatttgagattcatttagttctcattggtcaccttaggaagcacagtgcatcatctgaatgcatgaatgagaaaaggaaaattcacttttagttgaagagatgaggtgagaaagcagataggcaaagaagacaagacctggggatcactgtctaaactgggtagacctgtttagcataccagagatagggctgtgaccttgtggggtgtgacagatgagctaaccaactttgaggtcagagatggcttgtggtaatcagtcccagagtgtgggagcaggagagagagacatggaagtgtttagaggtgtactagtgtaagtgaccaggacacatgtgacttgcttgtttttccaaatgatgagcctggcaagcattcacaattcctgcaagatgagatttatccaagtaccatccaaccacctttgcttttggggtgcactctattgtgagcccaattatttttttctttgaggtcaagggttagcaaactcagcaaaacccaccggtcaaatgcagcctgccacttattagtttctactggagcataacggtgctcattaattgacatactgtctatggctgcttcttccctacaaggatagatctgagtaattgtgacaaagacttgatggcctgcaaaggctaacatagttactatccagttatttatagaaatcaattgcccaccccattctagtttgacctatctcagcaactaaaacttccagataatttctgcagagttttcaaatatccaacttaagacatcacacgtcttaagtccaacccaattccccaagcctactggaggaagggctatcttatagatcagagatttcccagccttcatctgagccccacttaagtttggtgttgtgaggctatggaaatgttctgtgctgaaatacaatttgcattctggacaactgttcctattaccgtccctaggagagaacttcccaggcccggctcagcctcagggtgttttcccaaattcaccagcctgcagatggaaaccgcctgtgcattgtctcctttcacccttcccagctgttcttctcccaaatttcccttttctttccttttagaatttccaaaagagcacactcagagttttagacaaactctgttctctctttcttctgtgatgctcagtagagatgataaacagtactagttagaacattaaaaaaaatgaattcttcatataaaagggtttattccatccatcccacctaggcgcacattcgccttcctctgcctcccctttgaaatccagagcttcctggagtcaactgaaacaagagctcatggcctcacccacagcacttggatcccatgtagaagtcgtaagttcttctctgactcaaggtttgggatcaagtcaactctaagtacacatatgtatggccattgctgactacatgtgattcatgagggttaatgcagtttgtaagacccagatgacttataatgctcagcatacttggaggcctccatccttactgctatctagagtatttctaggacacatgtcatcatttgaataggtcccagctaaaagctggctgtggtccttcacagcgatcagaggagaggctgatggaaagcacatacttttaactgttagcctaactgaaaagaatgtcagaaaggaaagatagaaatggaatatgcatatgactgtgttaagacacaccaaagctggaaattatttttgctttgatagtctcctaatttacatgacccaggctaaggctgctgcttattagcatgggtcattgagctgtctgtatctgcagggagatgaatattctcctttagagcaacttccaggctttcaggaattgtatacggggatagaaccacatggttttgcgatggccaagagggctggttggagtgcctcggatgtgattttggacccccaaggttaggggagttacctcctctctgaccttttcctagccgctgcttctgtttatcattttatcttgtcagagttcacgtgctaaccatgaaataaagagaccccccttccctttgcttcccacttgggccctgatgaattttggttgcctcttcagaggctccgaaatccctgctctaatttcaattagagcgctccctgtggccgtgcaggctggggctgcagaatcaattcctaatccccacattagcactgattcatctctttcctgagctctagcaccggcagctctcgggagagggagggagtgagaattgagcaatctttcagaagaataaatatggtttgtttgtatttgtatttgtttccacgctgcattctgattgcatcccatgccttgacaccacaattattattaatttccccgtctgctcttcaattcttgctgccacaaagacgagatgatggataatgttagatgtggtaattggatgagttgggggaagggagagaagaggggagacagatgtttcattatgagattttgcatctccatttgggcctccagcacagaggcctgaaccgcagccgccatcatgcaccgcagatgagggctcccgtttggggcaggtctggcctagttctgcatctctgctccacttcctcgccttgtacttctgcgtcttgggcagtcggatttcacatccatttctggtgaacgctggaaagccagtaagatgaaacctagaaagctggacctggtggcttggagggttgcacccccaccctgccctgctgccagaccacatctgtcctgtgccacctctcagcacgtgtgcttccacgtgcgagtgtggtagccccgggtgagtgcccactctcagagatgaggaggctgggctacacgaggaaggagctcaacagactgtcctgcgctgaagccgctgcctttgtcctcccaccttgccctgagtgaggggttggagcagctgtcacagctgcaccatcttcttctctgcatggcatccagcctctctgttcaataatctgtcatccccaccaataatttttctgcccccatggactcatccccagggggttcactgtccctgccccacacaggccagcctcctgtccaacatgatgcaggctggcaggagcagtcctggctcttgaatacacacctaagcatgcagcctggcccttccagggaggccaggtggagtatttgctaggatgagatgatagacctgcggaccaggaagaccttatgggtgctcatggaactctcattcatgagaaaaccagcagaggctgcctcacttccaatttcttcttctctgaacagttctcagtccatcagtgcagagcacatggaaggaagaggctacctcaggccagagacaccgaccctgtccttgaggcactcctccaggttgcaggagagaaggctgcaggctggagaaggcctcgaagtccagcctctctgtctagggctgatgctgcctgtggcggccccaaccaacaggccagtgatgttggtgacccggaagtcacgacaagcctgctgcattccagtggctttcgacttcagctggactgtaatagagtgggaggaatggtggtctaagtcattttggggagttttgcagggggcatctctaaagcccctgcttctgtttaggaggaagcttttgtccatccactgagaaccctctaggagacagcagcaatggcctacaataggcacattcaaagagcaggggcaaaatgtggtggtgaagaagaagaatttggaaaacagagtcctgtgtgctcccagggaaggggaagaagggagggtctctggtgcttctgagctataaattggctcagtcaggttaggtgcttacatttatttttcttctcatcagcacggacaccgtggctggtaatggagctgccgtgcagtaactcatgcatgagattagcaacacagaaggacagccggggactgctggctgtaggcgggcatgggtgagaggaactggagggtgaccaggtgtggctgctcactcaggtggactcccacaggggcatggaggtgggggcttacattccgaatttctaggcaaggaggggaccctggagatcattacagtccagcttcctcgttgtgcagataaggagcagaggtccagtttgaggaagggacttgcccaggggtgcacagcaggctggtggcagagtgtgggctaggcctgagtcctgtcgtcttgcctgcagagggattatgctgtagggaggagagtgcctgtgatggctgcacagccagatggtgattccagcaccggccagatctgtgctgcgttcatctctctcatcaaaccctctcttctaattcctccgtgctctctctgttcttgtggtaatttccaccagctggcccttcagagaagcgtgtgtgtgtccagaagcatggaggccgcaggtgtactagctgatcctgtcctccccatgcaggactggagaggccttggaagcccagctcatgtcccacctgtgcactgcctgtgcagaagcctgtccctacgaacaggctccactgtcaacccactctgcttgccagatgaaaactgggtgagtcaagaaaaggcagcttctacctactcactccacttgttcgttccaggcaatgtccccatgtttactcacgcacgcattggattaggagacctggaatctgagatgtcccagcaagctttagctaaggtcatggttacctccatgaaactgctgctgtaagtgccacagctggagttataacgatttctctcctttcctgcaggtccctgcaggtaggctgctttcttttgtctcttaagtcactgccacttactttgtcctgcaaaataacttcccaaagactacactcccatgtgggccagtcttcccaggtcccaccttccctccttgtatttgctaactcctttcttggtcctcagcttcattgctattcatccagtagatgaggaagaaagacaatgtttatgcatggggtgaggaagtgggggagtcataacccgaagtggctcgtggcttccacccaccatctattggccagaactcagtcaaagaagagctgctattacccttgacagttccttgcagctgtcacttctccctgagcccattccgcctgggacccttctcccttttttatttgatgaatccccactctgacagcttccaagtcaggtcttggtttgaccccagggaagcctccctgaagtccttgtcctgggctgcttggccaaccatgtgcacgtaaaccctggactgcccttggtgccttcacactcttatgcatgctcctcatccatttttctgattagaccaccggcttctcaaggtcaaggtctcagttacatcttttattttctttaattttagtttttaacacagcacttcgtataatagatcagtggttcttaatagagattataacttacaatcactagtaggccttctaaaatatctgtgctgggctctacctctaaataattaaattgaaatctgtgaatgtagagtctagattttttatagcccaaatattcattcagggttatgaatcgtagtagatgccacagaaatgtttgttgaataaataaacctttttttttctccagaacttaggagtgcaaaggagacagggcagggcaatgggactctttctggggtcctcaaactctcttggacaagttatgcccatttcacacagtctatagacatcaaaattgatattaaccatttaaaagaatctttcaaatttgtcctgggtgctttaaatggaacagaacaaaatttccttcttctagtttcagaattagaaaaaaaaaggtatacatgccaagaaagaaaaataactaacaaatattttatcataagcacttatggaccaccaactctatgcctatatccaagtgggaccgtgagcagcatatgacatatagaggcttagattttcgagcttagccaggaaaccaagcatatgcacaaaagagaactgtatagatgagtattttctctggatattttaaagacacattacttagtacagataattagaaaagaagacagcataccatcaggtgctaattatgcagtgcagaaaataatgcaaaaggagtgagaggagggagaaattcctctgggctcatgtcttagagaaggctttgtggaagagcgagactgggggtgcagctggaagggggtcccatgcaggaactgctgtgggcagagggaagccttcccaggccagaggactctcatgtgcagattcagaaatgggcatggtcatctggacattttgtaagagatgggtatggctggaacaggtgtttagaggaaggaacatgaagtccaggtgtttgtggatgatagaccaaatgacagggaggctctagcggcagaggtgagatctttgctggagccacgagaactagtgctggtgtgtgatctggagaccctggggtcccccagggcttggagagctgactctgacaagggcatgagtgaaggagagatgtgaggaggagcacacacagtggcctgcaaggagaccatttgggctaccagggcatgaaggcatcaggctctggcccatgatggcagtggagggaggggcatgaggctgtgagagcctggccacctccagtagaacagccggcaaagcctgagacaccctcccgctctccgatgaccctggctcctctgggctgccgcccccttccctgcaccctgagcatcctctcctcacctgatcagaggccatttggaccctggatttgcacctggggcacagcttcctcgaaaagaagtggggggagggattgatgctattttatcaccatcaaggacttctgaatgtgtggagttttctgagtttaacgggctgagaaatggaaaggcatttgttggcagtgcctggactcccaaactgctgtgctgccgagcgccccgtggcctcccggctgcaggccccactttctctctgagctttgctgtggcacagacacactctttgctcacccacagtccattggtggtctcaggcagggagttcacctttgaaggcatcctctttttaaagcttgggaaaagacatttcccgtttcccgagctcagcacctccacagatggctacttctttctagagtgttctgaattaaaacaggccaggaggaagccttctgaaccaactgacatgtgtgtgctcatttgtaggaagaagttaatgataacttttttgccatcttgtaaagctatgtgatgatatgggaaaatgtcctctgcatgacaggtgctttgtttggagagccactatcgacatagacgtgtattttagtccctatgaagacactgaggctgaagggcttcttggctttcccaagactccacaactagttatggttcttggtatgagcccagcttctctgagattcctgagagctcctgcacccttctcctgcagtgcagacaatacttagaatcaggccacacaggtgctggtactgcctttgggtgggatttttatcgctcagatgactgaggctgctactttatttaataaactttcagcaggtgtgcagggctgggggcaagggaatggccatcttcatggcttggcagtcctttgggactgtggaattgtcaatgtcctgggtgataaaagcatgcacgactctggtttctttttctctggggccaattctcccaaaaccgtatttccaatggctccagctcagcagagctgtctgtccaaaaagcagagatatttcagggccatggatgctttctgaatctctaagtcctcccttcttgcccacaatgtcatctcaggaccaatggttgaggacagggattcagatcatcagcccccaactatcataggcagaggagaatccctcaaatttatgacagcaggagctcctctcagagatgggaggttgggacataggagaagaagaaagaaatgtcttctgtagaaaactcaacctctgcaacttccccgtatgtgccttcaaagagaggagaactcttgtgatgataatgagtaacagtgagtagtctgaattttttcatttttaggaggcttggggaacagtaactacttggtaccaacaaccctattatgaattaggccacaagtattattccctgcatgaagaatagagactacttttctctagaggtgggaaaagaaagagactacaaagcgacaagtacaacggaaagactttcattaaaaaaaaataacaaagaaaacacaagcaaacaaaagaagagtttatccaggaattagcaagtccacaaggagccttctggaatacccaccttcctggtgtattggtatattgtatgttggtataaaatatgcaatctaagtgaaagggaactgtctaaagttcccaaacctcagcttccacgtccatatggaaagcaggagccatttgccatctctaatgtttgctcagcattggctgcaggtatctgcctggggaggacggtgtgataactccaacatccacatgtccctcccacaccagcaggctcggggaaggagggctgaagagcctttaggtgtggggttcccacagggatgagcctgcagtagtgggctgggaagtgcaagctgggctgaacctgtctcccgtgcaaccttccagcatcatttccatctgggaccttctcatcaaacatcgctcccagtctctaagcacgtttatttcctcaatgttttataatcagatagagctcagctcacctgtaaaaggattacagcatctccccttatctgcagttttattttccatagtttcagttacctgcagtacagtataataagatcttttgagagggagatcaaattcacctttattacagactatgttataatcattctattttattatgagttattgttgttaatctcttactatgcctaatttataaattaagctttatcataggtatgtatgtataagaaaaaacatattaacctatgtggggttctgtactatccactgtttcacacacccagtggaagctgtggaacacatcccccttgagtaaggggggactactgtattcccttttctctcttaaaaacaaaatatttcctttcctccctatccttgtctctgaaaggccacgtgtggcaatggcaggcgtcccccaacacacctttacccactttaagtggagagcagagtccctacacactgctgcttcctgcgctttacagagctaggagagctagggccatactcagggattttgtcagtcaaggtaagggaggcagagaggcagagagcttatatccatcccacaaagcacacgtttgccggtgctataaatttaaggaagttgtcttcacaggcagtgtgtttgcatggagtgatggggagaggggcgggagcagtggagaaaggggcttgacttagaaattaatgacagctgcattacatcctgatctgtggacatcctccacaccctgatttgatattacgctggggccacagagagaagaaaaatcacctgaatatataaagcctgtatttggcatagtgtaaataattttaaatgaaactgtcaggcttaagccctgaaatgtgcctccagcaaaagataaacacacagaggagaaaggggttctatagggaggggggaagacatcacaatctttaatatttttaatcagtctgtcatctccaaacaggacacattgttgcagatacccttgtagactatacatttgctgattttgtgtgcgtgctgttcaacgcaagcatgatagttccatttcagaggctcagcaagacttaaaatctgcttggcagcagctgggccagtaaaagcatcaggtgctgtcaatgggtgactcagtaatcgacctgaaatctgcaactgtaatgcaacagctgcagccagccccgtgggttcataaggcttggccacaggtttagatgcaggaggtgttacgagtagacggcccaagcggaggctcaccccagaggctgtgcagctctctgaaggctgcagccccacctccgcacgatgaggctgctgctggcattcccactgtcagaccactgagctcaagttctggcttcaagcgctaaaaccttcctgagggcctgaccacaaaggagtagaacgatgaatcagtaagttttatcattttctcaaaggaattgttacatagaagacaatgggtccactgaggtagggggagaggctgagaagaatggagggagggtctcgaaaagcttagggagaaaggtttagcagtggcgttcaaagtcaaatagagatttgctaaagtccaggctcaaatagaggtctgagcccagggctggacagaggaattgtattatacgaggggtctggatgtgatccaacaggtctaagttctgaagcaaagcagctcaaggctggtggacatgctgggagtggtggaggccttgcaaggaggactgtcagcaaggcagcgggcatacctcaacttggcacgtcacctctgttgaagtcgaataaatatagagatgaatgtcttaatttgaaacattttatctgggaaacaagaattgcgttttgaggccgacatacagtgtggatggtctttggtatgtctgatgaacaaagagaaagttggaagttttataaaaaggagaaatgttattcattgttctgaaagaaagttcattggcactagcaaagtcttgacccatttgtgcctaggttgcaaattttgtgtgtgtgaaaaataagaccttggcggtgaccttgagcagtaggatataaataactactagcttagcgttccaatagtggagcactaggcataagttgattaaggagctggcaagctctgactggtgagtgacaatggtaggtaaaactggtctcagagtttgtttcagtagcagcaggttgtttcagtcgctgttagataaaactggttttcaattacactaggcagttccagaaaccaggctagcagagaattatatttctgaagcaatgttatgtgtcctgagtgctttttcccttggcctcttgattctgttttggttgagtatgacaggaatgacccaatttgtataatcaacattcacaccttctctgcttcagaactgagctgggactgccctccctccttcgttctcatcaagccagctaaagtcgagtgccccagcatggctcccaaaacagacaggcccagaaagccagtgtggctctttgcctcagggaggggtgctgcagggtaagcagcttgcaaagagggggttcagctcagctctaagagaaatgggactgagaagggaaaggggagcccgaaaggaaaccttgatatcatgaataatgttaatttggagccaaagaacctccttgccgatagagaaaatcctgtctactcgtaagggcttgtgcatgcctacattttgagttggggctagagttgatgacactagcatgttcctttgaggtttacaattctattttttctcttatatggacggatctctgcttcagctaaattggattatttgctggacctaagcttcctgtgctttcctatctctatgattttcatgcttttctgactcttgaaatgtctcctcagttcacgcaacaccatgtgtgaggtcctatgctggatgacggaggtccagcatcatataagatgcttcagtgtgctcaaggggtgcaatgtttatttcagggaaatggacttgtaacatattacaaatcaataattcaatgaatatctatcaagcatactttctgtgccaggagctgtacttggtgctagggatatggtgttgaaccatgagagagttgctctcctccaggatccaagtgacaacagaaggcaaaactaactagcaaacatataacatgaagaaaaacaaagaagactaagtccaagagagtgtgtcctgtatctttagatagggtggatgggagtagcttctcagatgcagtgccatttaagcagagacatgaagtgagagcacacagatggccagaaaggaggccccctgcatgcagtagagaggtgagcacaagccgagaagccacaggaacccaaaagaggggtgggggaagggaggagagcagcaggtcagagagaggctggcagagagagactttggccagccacgaagaagcatttgtatcttcctctgaggaagatgggaagccactgggggttattccatttgccgaaaggaagatgattaagggaagaggaagtatgccagaaatgatactgcggcatggtaagtttacatacagtgcctgtgaggtagcaaaacggatacgttaagtaggtgtttgtgtgtgaaatccggagttcaggaagagatttggaccaaaaattttggaatcatatgtgcaatgcactaaatgtttttgtcctccccccccaaatttatgtgttaaaattttaactcataatttgatagtattacaaggtagtgtctgtgagcagtgattagtttatgaagatggagacctcatggatgggaccactgtctttataaaggtggcccccgagagctctctttttggccaatgagaaggcagtgatctgcaacccagaagagagccctcacagaagccagacatgctgacaccatcagctctgacttccagcctccagaactgtgagaaatgcatttctgttgttcataagccactcactccacagtattctgttatagaagcccaaatggactgagggtatgcaatgcatgcatttgagactggatcactaggggatgagtgtgagtagagagggaagaagtttgattactgagcctggagttactccaatactcagcagagaaggaagagcctggaggcaggaggatgaaaagaagagagtgggttcttggtttacaggtgccttatgcaggagagcaatcaacagtacaagtgctgctggcaggtggagtgagctgagaactaagaagagactgctgggtttggctatgccgagatcacctgtgacctgacaaaagccttcctgatgcagtgatggagacacacagatgtgcacatttggaggggaaagcccatagtcgaagcatttatagggcacagaggagagtggtcaagaacacctgcggagctccttccccagcctctgcctaccaaaatcccaccatcacaaaattcatctgttctcatttaccttccctcagcctctctccctacccaactggactgattttctttctccttctaacacccagcaggattttcatgacgtgtgttactgtctgtcacttaggataggggctctgggtgatgtgttactcacatttgtgtcttatctctagcacctagcacaaggccttcggcagaataaacactacagaaaacatttgctgaattaaattttgagagtagttaccaatctcaggccacccattcccagggctgtctaaactgggttgtcaaatgctggagcaatggtttgcaaacttagttcacatcaagtcacctggagggcttattcaaacagttttctgggttccactcaagagcttgtgtttccgtaggtttgtagtccaagcatttacatttctaacaaggtcctaattgatactgagacttctagttcaggagttgcacttggatacccactgccctagggcaaaaacatgatttcattcaatcatgtccattacttggcttccctggagaagctagctcttgtttctttgtacataaaggcatctggccagattgcacaggataatgtgaataccacctctccatgcagttaaaatgccttcatggatctgtgcataagcctcccacatgggggtgcagacatctacgccactctcagaaagtagatcagacagctgccattcaggacctactgcgtccaggggccacaggcctcttgctctcaccagcaaggtgctgaataaacaggtgcccattgtcctcacctgcttctctacagttgtatcacccaggttcagaaagggcttggtgtcttccaaaaatatttttaaactatcttatagatgtgttcattgcacatcactgaaagtctaaattctatgttcatctataggattgatgagaataagaagtaatacgataatacagtattatcagtatttattatgaatgttcagaatttcaacttacacattgccagcttttagaaagaaagactatagaaaaaaaagaattaataggatgattatgagtgcttagaaaggaaaaccgcattcactggaaacaagcattgattcactatgagtaagtcctattaacctaactcatttcctttttctacctagttacttgtgaagaaatttagtaaatttcatgttttaaatctaagcacggtcctgggtggtgggtgaatttgtacctagttgaatgacagtcctgatagtgttgagtagtgggtctgtgtcaacctggaggaaggccttagtcttcaactctgtcctgtttaacctatttatcagcataagatagagctactgaagacatgcagatcatactttcacctgattcaaggctggggtggattagttattagcatgacagaattggatttcaaaggatgttgacaagcttaggaagtgggccaggttttgtatttttttaaaaaaataaaacaattgtctcaaagcagtaaaagaaaataaggctccgtggcagaacttaaaaaaaatgcttaggaattttagttgccagaaagtatgatgtgtcgttagtgtgtgtaatttcccgaaaagttgagatatgggactgtattaacagaccaacagtgtccagaacaaactttatttccagcattataagcagtcagggattcatagacagcgtaatgccctgcatggcccagatgatgaatagactaggtcatgtcttctgatgaggaatagaaggaacagagggagcctagccttcagtctggagagaagaatgaagatttcaaatattttgaaatctctcacttggttctcatttattttgaatggccccaaaggccaaaagtaagatcaataaatgaagtaataggattacagattttggcttagtatacaagtaaaatttttagtattcggaattatctatagatgacataatgacaacaataatgatgatgatgaagaaagcaaaacctgtagcaactcatgcagtttcataaagcacttcttaatccaaatactatgctcgattcatcacaccaggagagtgctttctttcttttttcttttttttccttctgagatggagtctcgctctgtcgcccagactagagtgcagtggcgcgatctcagctcactgcaacctctgcctcccgggttcaagcgattctcctgcctcaacctcctgagtagctgggattacaggcacccaccaccacgcctggctaattctttgtatttttaatagagacggggtttcaccatgttggccaggctggtctcaaactcctgacctcaaatgatccgcccgcttgggcctcccaaagtgctggaattacaggcgtgaaccaccgcgccctgccaagagagtgcttttgatgtcactggggaaattcagcccttggctgagcaacagtgttgcagaggatattcaagtattgatagaaagttgaacaaggtgaccttatattatgaaaatactgtgattctgagctttcttaagcttgtgcacagtcagaacaatcagtacaaaatatttgtattcttcaaatagtttagatcatttcctctggatgttttcaagtataagggaaattgtgaagatgagggtatcggttgcaaaagctaccttgctctacatctgagagagggattgcctgtgaaccagaatctacgggtatgcctgtgggcaatcactgttactttatagccaatcttctgacaataagacttgggttggccagtgcattataatcccaactcccttattgttgcaaagtagaatgtctactactcagcagattgggtgccatagagatacagaaatctcagaaaagcatctcatgaattcttgtaacttccatgtctgtatagtgactgatacctaccgatatttaacaattttgagttggtgaaaagaaaattaaaagacagctaaagaaaagtatctgtggaaatgacattaagagatgggagagacctatgaacatgcagaagctaaagaagttgaactcagagaaaagagattagaagggtgcataccaggggtagcggggtggaggaaatggggagatgatgggcaaaggatacaaacttgtagctgtaagaggaataagttatgaagacaaatgcagagaacagtaactatggttaataataatgcattgtatatttgacatttttgaggagagcagatcttaagtatttttaccacaaaaaaagataactctgaggcaatgggtatattatctaccttgattatgataataatttcacaatgtgtatgcaaaccaaaatgtcacattgtacactttgaatatatataatttttctttgtcaattatacctcaataaagctgaaaaaagagagatgtgggagatacaaagcagggacattcaaattaaacatgcctttatctgaaatcccagcaagaccaagagaaacaaaaacataggtttatgcacacacaaaactgcatgcaaatttttgcaacagctttattcgtacttttcaaaaactggaaacaacccaaatgtctctcaactagtgagtgggtaaaaaaaaactgaagaacaccacacagcaaaatactactcagcaataaagaagaaagagttgctgatattgttacatgttttgtggctgagccttaaatgcagatccaagaggctgaatactgtattattccattcacagaacattctggaaaaggcaaaactattgtgacagaaaacagatcgggtctggggttgtgggatgaattgactataaatgggcacaagagaattttttggatgatggaaatgtcttatatcttgattatggaggtggctacataactatatgtttgttcaaacacataaaactatgcactcaaaatggtgacttttactggatgtcaatcatacatccgttttaaaaaacaaacagtgacccaacatttaaaaatacaaaaatgacaaaatcaagaggctagtgagggctggggtcagccttataagaaggaaggatgcaaatggcacgttgaagttagtgaattcggttcagcagagaagaaaggttgaagattgtcagctaaatgctgcttttctttgtcctgagttccctcttccttggttgagagtggccactgtttcagttgaggggatctgattctgtttcagtggtttcctttcatcctgcatggatcctggcaaactccaacatgtcctgccctcttcctagcattgtacagcaacttccaggaagggcctggcagcaaaactgccttctccctagagcgggcccacctagggtggtccaccaccttctccctagagcaggcccacctagggtggtccaccaccttctcactagagtaggcccacctagggtggtccaccatggcttgtgcctcccagctgaaaggtgacaaacaaaaggctaacctggaactaggaagggtcacttatctactcatgaaaaaaaaaaaaagaagatataggtaagaataggttatttggaagattcaaatacaacctctccacatcttctttgcatgcagtgcagcaattgccggccctttagagagctgccctctggcccaggtctgccctgaggtcagtgactttacctcttggaccttcagctttctcttctggaaaaagattataaaaaggttacaggagcaacattccatcctattgccctcctgtcccatggtggaaagcagccggagattgtaggatctgagcacaagccttgctctccatccacagctcctggtgctgccttaaacgacaacagcaggtgcacatggcaggatcctggaagcaggggcacgtgcatcaccaggaggtcctagaccacagcagagaggcatgggtgagggtagcacccagctctgccccccagtgcgtgacctgggcacagctgagccaaacgcttgactgccattttcacagctgagaggtgcagcttgtcatctgtaccttgctgtgtggccgctggggccccaggcttggggattagcatatcagccaggcacatggtgaatatttagtcaatgacagctgctagtattattatttaatgtatttgtattaaatatcctattacatacttattaatacatttatcaaaaataaatctattgaatttattatgcattattattactgttatcgtgaactagctttacattgtcctacctttataaacctggcccctgcaaatactctgcttcctgacgcttcttcattgctgaaatagtccatgtggaatccatgctggggcatcggcgcctctcagactcagcccgaagccgcagtgccaggctgcatgctaatcaggcggtggctccaggagaacgggcccaggaaggagagaggatggggcctggaggcggcagcctgccctggcagcttctggctcccagagattggtttatcaccaggtttctgatgaatgtgtgagaaacgggactggcgataaagcagcacgagccataattaaagtaacagctcttgtttcttaaaccctgtttatgtggtgcttggctttctaggcagtttccccgtctcccacttgaggaccgcgagtttcctctctctggagattgtggatgaggggctgctgagggaggagggtgcagaggggccagcaggaagagcggtggacgtggctgcaggaagctggccccttggttcttcatgaaagtgtcaggcaaagcaagtccctggagaccaagcaccatatggaaactttctgggaatgcggcagggagttgcaaacacaccatggagccctggaactttagaagaccggagaatgatctgtcaggacacctggccccaccctcactacacccgcagcaacgcagggaaagctggggggggggcagcaacaagggaaagggggccccgtcatacattcatgactgaaccgctctctggcagccgtctctaacctgggtggtacattcacaggttataaattaacggaggctcctcaacagatttgcctccctaacaggattcccaccctctctgtttccttctctcttcctggctccctcctcttccttttcactctccttttccttactgccccctccccaactcccaatttggcaaatattctacatactcaggcagtctgacacctcgaacaagctcacaaatcagagatgtcttccgccccagtcctgggaaccagcagtgccccgaggggccaggacgcccttctgccggctgagaaccacattctgtggaattctggctgatttccatctgtcagtgtccaagcgggtctgcgagggatctaggagagccacaagcaatgcttagaaagttggtcggatcctccaggtacttttcctaaaatccccaaacctctgaatgtgccggtctgggttgatagctctgctggacaagaccccctgttttcattttgactccatgtttctagaactgtgatttaggagtggaggccattaaagcctttggaaaaatcacacatgtaaacacacacgttttacacgtatacacatgtatactgcactgagtttagctgtttcccaattctccccaatggtggataaattccaagaatggatgaccccagaatgatttatatttggctttgctgtatgttaggcaattaatgcacagtggcatgaccctcccatttgggctttgctggtgacaaatgagtttgcatttcttgaatactaaccagctgggtggcgaggtggagctgcttagggataagctttgcacagatgagccgccccatgggtgacctgcgggtgcctccgtcctctaggatggttggccccacacacgtaccatagcccattgcttctctgcagcccagactggaaaagggagctgtaaactctgaatcacactacaatctgagaaaaatccaggtttctttttttttaaactagaagtactagactggtgaaggcaggaggctccatggcccactgggagaaggtcattcctatgactgcccaggttgccagcttactatgtcttctcttccaaccattaaagttcttgtcatacctggggtctttcaccccaggccctgaggcctaagcccctgggatctgtgtactcctctgaggtatcctgcgacctgtgattttacagagcagagcacaaacttggattgaaagtcaataaagtattgaattccacagcgaacagtcttttcttttgtcagaattccaaattgggccattgttagcacagacagacaggactagatactcccctgaatgcaccagagccattcccaaagctcggttctgcagggccatgtggcaggaattatacctagcttcatagaaaaggtctgtggttgtcccttggctgtgccctggagccgtgagacccctctctgtcctccaaagccacagcagggtaacctgatacttgctaatgaccaccagatggctgatgaccacaagggggcatggccctttgagcgccccttcagggtagaagctatcactctgcaggagtgtcaggcaaagcaggatgtgtgtctatgaggaacctacaagcttttgcccaaagccatcagccttcagcagggagaagagcagcatgtgagcaggtgcgtgatctattctggatcctctcagagcctgcccgaccctgacagccaaggattgtgcccgtcgaaggagcccacaagataaatcaaggggcagagagaagaaaacagcaaagaggagtgggaagacggagaaggagatgttaaccgagagatgagcggaggaattcaagctacaaatgcagcccagatttattgacttcttcttaagggtcaggcctcgtgcaaagtgcattttatttaatccttaccacaatcttattacaacaggtgctattattatctccatcttagagctaaggaaacttggactgtaagcatttaagtaacctgatctaagatgcacaaacttgcataaggcttaagcagttgtggaggtttgggaaaagtgacaactaaggtcagctcttggaactaacccctccctggggttgtgcaggctgtgtgctagcccttcctcagtttctctttgaaatgagaatcattctgctaatctctctccctagcatgttatgccgcacaagttatatgtattaatttgcggcatcactagcctctcagtaattatctccatgaattccctcctttccattgaaattaggtagctgggtatatcatggttccaaatcactacagttgttgatagagcaaatagaatcaagtatataactactatacttggaaaggagacagcttttttgaaatcaaaatcacaatttttttctcttcttttaatttatttttattgtgttggaaatttgcagacttattcctcactcggtcacactttcacaactgcaaggacaaggggaatgaaattactggcctgctttccagctcactgcacactcactgacacacacgtgtgcacacatgtgcatacacgtacacacacgcacatgcaaacacaccatacaggctcccaatccaatccttagttttctggcgtacagggactctgaagaattgcttcagtagtttgagaatgatgaatgacaatgtttttaaaatatatatttactgttggtaaaggaaagctaaggaagggagagagtagacgagaaaagaagagaatgtaagaggaactaaagacaaaaaggtggggacagatgggccaagaggggtaagaaggagagggatcccaggaggaaatgaattgtaactcagagaagcccttgctcctgacaatcatgcccttgcctgtctgcatttccacgggagatgagtaaatttctctcattcccataactcatcagtagtggtcaggagggagcccacctcccaccaggagggctctggacttcatcagcccagttaccctgcctccagacattggttttacacaaactaaaaaattcaactgcacttcagaactctattatctggccaagtggagagctggccatgatgaaagctaccccagacattctggtagtgattcttcaaggtagaaacctgctctggctatgtatctgcttatgttcacagccctgagatacctgagtgttggactaaaccagtgttactcaaactgcaggctgcaatccatgagaggttattaaataatttagtggcctccacttatgatttttaaaaaaataaaatagaattactgaaatgctcaacatatagaaaggatattttatgaacagtttattttggtggagtgtgtgctgtgtgggtcacagtctagacaggctaaaagccacaggattgaatgacctgggaagtttccagagagtctgtgacctctgagtgagctgttcccccagccacttaaatcttgaaaatatgggccaggatgtcttctgataacaagctccctcatgtttcctctgtctatgggattctgtatttaagaagattctaacacatcgtgggcatccgaaacgttccaaaacttcttgagtcacctctttggacagctcccgaagagtgcagtgggggaaagggatgacgtagggtcagtgtgaactgatctcacaggaagggcatttagtacggtggcttccacactgcagagcccccttggctggcaggtgcacagcctgcccactcgcactttgcctgccccccttcctgtctgtctgctccagcccatctgattgactggctggctcaggccacctaatgagaggcaacaccccatatgacaaagcccatgctgtgtaatgggttgattgacatcctcaggacgtgattccgcatgcagcctcacttgcagataatgtgaatggttgaggaattaaaatgttgctcggtgcttaatgaatgcagcatgagcctcatgttagcacatgccagctgcatctctgagaaccaggaagcagcaacaatttctaaattatttatcaattcccttacctccaccccaaaagaaagtcagcttatgcatttatttatttcatgggccgatatgcagagtaattgctttggtttttttgtgagttttttttctatagattttatttttctgatgctacagtgaaaaaagagagaaaatatcatgtcaatgtcatttgaatcataatagctacaaattcactctcctgaataaatagagaagcttatttatcaaacacagacaagatgtctgtcgagttgttaacagaggaagagagatttgagtgggcaggagcaattgcaaaagtttgcatatcttcaaaactccctagggaggtgcaagcagctttttccccagctaggaactttctgttttgacagctgattggccagcaaaattggctgttccaccttcacagggtgaaaaggggcaggtggtttgggcatcctagctgagcctggacctggcaggtacgagagtgcttgtccccatgcagattcttgtccatttaaggcagaacaattggatgaaataccaaggcaataagcagatggaaagcgttggttgttcttacccatggcctgtggctctagcttttttattctgctttattttttcatcttatcctggcagagctggctgctgctctctgttgcaaatccaagctccgtttcatcctttccctgggtttccccacccacaaccagcgcctctgcatctcccctccccacccactgccactgtgaggccacctctgctaacgtgtgtgggctctgtgaatgcttctgtaagaagcagcacaatgtaactacaatggctactatctttggagtagggcatcttctaagggttttacatatattatctcacttaattctcaggatacatatattatctcattttattcttatatcttcctcagctatgaggaagataaactgtttttatgacacttgggtataaatgagaaaaccacattccaggaaggctgatgacttgcccaaggtcattcccaggatttgagctcaaagtcttgtccactacattatactgccatcacagatagacagataactgactgcagatcaggagacctggaggccatccctgacagctgagttgccttgggcgctgcctatacctctctgggagtcagttgctaggcagctgataggctcagtgtcataatgatagggtgggtttaggacaagattgcctggggctaaacccatgtactaccactgagctatcttgggtaggttacttgagcttagttttctcatctataaagtagaaaaatgatcatagtacctccctcactggaatgattttgatgattaaataagttcctacatgtagaataatgagagccaagcttggagcatcgtaagcagtccatgttcattatcactatatagattttgtctgtgtgtccatctttatagcatgaggggattcaatgcaatgatattctaaagtctaatttggtttggaaatcctatgaatctggtctgcatttacatttccttagagctctgtagctctttatggtattattccaatgagaacaaaattagaggtgaaagctggagtgactgagccatggaatagcttgcacctgtgtgtctcatctacatggacactgcccgtcctcttctgtgactcatttcatatgatagtatgaccctcacgttatctgccatgggcaggacatggttactttctctgttttaaagacctgttctgctattagcccggggttagaaagttagtgggaaagtaggactctaatccatatgtaccgcttccaagagagttctcagttgtctgaaaggcaaagggatttgagccttctgagttcaactcccagcaaggaggtgccctagaaaagaagcttttgtctaactgtattagccatttttcactccaaaataaaagactgggcaaagcattctggctgtatttcaccagctcatttttctctaaacaccaacatttaccagctttcctttttctgatgagagagtaattaatcttgtctcctctagaccctcacactggcacacgttgctactgtcttgaaggcagatggttctctgggagaggaaagtgagatagtccagagcagcaggaaggcttgaaagttcaaatcctggccaatggggaccagcacaagttgccccaaaggctccccgagttacttcgaggctctcctctgggagccagctttgcacctggacatgctctcttggctcacaggcacatgagcaggtcagaccgtgaaagcagccctggtcttcatttgcatgcagtgggactatcaaaggtcctgaggggaagggagaggtgagagactcctgaacttaaaagggaaagcagccagcttctgggagcttttgtcaagccagaggcagagaagtgatgcctatgaacacttgcatttccacgctccaagcctttattatctagaccatgtaatccatttctgagctacactgtgctcgccgagtagaaatttcatctttctcaggagatcataagctcaaacttgacaggaaaccttcctgccatacatttttacagcctctgcagcctaacatcaagctgggaacatattagatgctcagtgaattcctgaacaatcaaatgcgattgaccaaactgaagctcacagacatgttattcatacatgagtattgtcagctcttactaactcagactggggagggcagcctcaacccagataactccacaagaatgtctaatccccaagataattctatctgtgatttctctaaacacaatgcacagttctgtttacctatttgccttcccaaggaagttttccttggttaatccaatcgctcattcaaccagtttttacggagtgctctctgtcaggcactgtcctaggagattcaagggtgatgaaggcagccctcatctctgcccacttgggatctatcacgtatggggaaaagacagataggacaccatcatcacatgagttattttgttgtaatagttacatgtgctactgagggatggtgagtgttttaagagtgtgtaacggaaagcccacttagagctgcctgagaggcagggtggccgtgagggaattagtcttatatttatattaaaacttagggaatgagtgtgagaattccaggggcattggaggttgaggtaacaaggttaagatgagttctcatttctgattatgagaatatctgcacagaagcatgccggtaaattcactctgtccaaaaggcaaatgcttactccagggtctccagcatagcctgccttgttcatgaatgagagggtggaagagctgctcctggaggttctgtctggggactggggttgtagggatttactccgatcaccagctgcttgtctttccaccctgagtgttctgtggagtcagtctggaaatgagctcttcttgccaatgactcaaagtaggaaaaataaaaatttgcttatgggagagattccagtgggagcatggatatgctatctggtgcataatggctgtgaattccaaccagcctcctgaaaccaagacgtttcaattaacaggaggcacttcaaacctgaacatctctctttcctggctttccagtcagaatgctgttgtataaataacaataagctggccccctcagaggctgtaattgagtctcttctttctgctggcatcagcgggattcccttgagtgatttactgtgtggctatttaattgggtgacacatgaggaagtcagccctgctttgtttaattacactgggtatcccccctgcatggtgtcagcccccactctctggaagggctctccggtaccactcttgcccaggaaatgattgcaaaggtgtttgggaagaccagggacagagagaaatggctagatgtttgaaaaaggaagggaatgtggatagaaaagaagactgatcccatgaacagaatagttacctggtttacagatttaacttgttctgaacctaaataacattgagtgtctgtgtgagtatgtgtgtgaatgtgtgtgtgtgagtgtgtatgtgtgttggatgtggctgttaaaggaggggaaagagcgttagaaagtgcacataatcacaaaatacaagttagcaaatgttaggtgccttaagaaagacacagttatttttccaaacaatttcagcactactttcttcctgggtaaaggcaatgaggagaagggggtaagtgtaaaaaagctgatgggtgtttgacaatgaataaatgtaattttataccttataatagccctctgaggtagtatttagcatacccacttgatagataaagaaactgaggctgaaagacacagctagtaagaggtagacattcaatccagcctcatgcctgtctgactccgaagcccacattacttccactaccccccagagattgagtcatcccttgatctttcttcaagctgcttgtataccacattgactaattactccgtgaaatattaattgattttccacggtgtacatagaataggttttggtctcgtaagaatatgaggatcaataataatactaataacaatgaaaataatagccaatatttccagggtggttactattttctaggctttgttcagaatattttataaatattgactcatttaataagatacttgcacttagataactggacttcaaacacatcccaccaggcccttgaacagtgagcctctcacccctcattatttggggcttggtagcaggcaggagcagagaggaggctgtaatccactatggagcccaaggcaggcaggggtaccttgggctgtggcatggcagctccatgtccaaacacaaatctcccatgctttgacaactgctccaagagggtttcctaagggagtccatgagcagaatgtatggatcctgatggggagggagagcctgtgaatcaataggtgaaggcgtattcatcagacacaaactcatgcatttttttaagctcattcataggggctcaattttcctctgctcctggcaataccacacgtaaagatagcttttctcctctcagcaaagaggcagggataagcaggctttcaataatattagaagaactagagagtggacattacttagaatttcctagctgcaaggtttttgagaagcttggaagcataactgagctaggagagggaaaatggaagccaatgaggcgtggccatcccaggtataacagctccatggtggagagggaggggctcactctctctcctgttccctctgtttatttcaaacagaaccactctcccagccaaatcacatggacagctccagccttccttctctcagaggatgaggtagccctctccctgctaagagctgattctgccccatctattccttccatctctggcgtcttcaatctctccttccttttgactaccttttcttgatctacttttctttttcaaactattgagttttcccttaaaattaagaataaaaataaaccctgaacatgtcttcttctgacaatggtcttatctttctccttccattctcatccaactttctttaaaaagtagttcacacccccactgtcttcacctcattctctcattttcactcctcagtcaactgcaatctggcccctagtcttactttttcattgaaattactcttattcaagtcagaaataatgacctcctgtccagcaaaaactacaaaacgctttcagcatgctctgatctttctctgaacatatccacatctctcacctttgtaacagttgacacagttaacccacctcctccatctggaaactcttcttcctcagctcctgtggcccattcccctttcccagttttcctcttacagggttggtttctttgggctctaactgtagctcacctcttgctctacatcttctccttggcaatttcatttacactcatgtcttaaagtctcatttacatactagtaattccccaatcttgatctccagtccatgagttccacccctacatgcccacctgtctgccaaacagagtcacctggatggttcccaggtaccatatgcctcaggctctttatatccagcatctcattcatcatctatagctcctgctctgctttcttctgaattctctttcttgatttgtagcatctccatctgctcagctgcctagccaggaacctggacttttcaacattcatctcttcccgtgctccattctccagtcttgaaatttttatttcaaatataggcccatcttatcattcctgatatcactctcttagttatagggtatcattatatccttcttggactatcgcaatagcccctattctccttacgccacccaaacctatcctccatactgctcccaaagcaatgtttccaaaatgtggagcgggccatattagtacccatatttgaccagacaaagtccaagctgctttatgtcacaacgaaaggcttaatatatgtgatgctgggctttctctctagcctcattgcctgcccttgctctttaaggaataacaatgtcatgccacttgtaattaccccaaacaatcaaggccaaatgttttctagctgtctgctcagagtgttccttctgcctgaaacatctctcttcctctttcctccaccatctcattgactacatcatctctgtagtctgttctcccagttggctgggcccggttggttatagatatgaggaagtaacttttgcaaaccaagcccaaccttttaagcagacagagtagatatctgcccacatggtttgaatggtggggcttgaggaagctgataactaattatcttttattatttaaaattatttcattatagggttattcctctgattttctttgcatttttgttcttggagaggtttctatatatttttctgagaagagtttaatcccctaaacctttgtgagctcccacacatgagaagggggccatgacaggtacagagggtgtacctgtccctctcggcaaaatgggacatgaaataaaaaattgccctgaggaggaggaggaggaggattgaaatgcagggagctgataaactgctacatatcacagtcaacatcacacatcttgcttgggtaaatcatgtgggatgatctagtaagttaggattcaagttaatatttagatcacttaaaatgaggaaatataaatatttttcctgaataatgtagaattatcacccacgaagccctacattcattttcttaaaggaaaaaactgccaaagatagattgtttgtttaatgggattttatgagatgagccaaagtataactgggctttagaaatgaaagacaaagataatgaactcaataccttacaggtcatgggagacacagtgaggaaaaaatgatgttactgtgaaaagattgggaagagaaaaaaagaggcaggaagataaagacacattcaaaatatgtattgaccacctattatgcagacactgagatatgggcataatccttgccttgggtatttacctggaacttggcaggtactcaggataaatatttgtggaaggaaggaaggagtgaaggaaggaaaaaaggaagaaaggaaggaggcagggagggaagaaatgaggaaaggagggaggaaagcctgtgtattcttcttagtctgtgcaaggtgggtgaagttaactaaatctatacttactctttagcttttcacccattttatgttcttgcctagggtatgttcttctagaaaattcataatccattctccactaaggttagggagcactcttccatgctatctacagactacatatcaactcaccgtgttaaatgtgatgagttatttaatagacaagtgagtggcagggttggggtctaaaaccaggtagcagcaggaccccagctaatcatgtacctgggccctgtggccatgcttaggattggagaaggtctccctgctcgtctagactgctagctaggccagccatctgttacttgtctggaagggggaagagaggtggcatggtgctcagggctgtggcagatccagtcttggtttcctaatcagtctattatttacaggctccaaagtaatgggaggaggggcaggcttataacctgtgatgagaggggtttatgtgtgttctgggccagttttgtaagacagctgcccctataaaggatttatcaagacaataaaagaaaaaggagagagcctaaagacactctagtgaaaatagcctttttatggtatgagagtttaagagggaacactttgaaaagaagccacacttcccctgcccaccccacccaccccttctcctactcagcccacataggcggaaaagctctctaatctttatctcaggggctaaatactataagcatttaaagtttatttttgtcttatgatgacgtccagccttcaccaccataccccggataagttttcctttaattaggaatgtctttcctctttgggctattcttgtggatgaaagtgaggaacttagggggcacttgctatgcataccccgcaccccgtgttttaacagagtgataatagattcagctcgataggcatgtcttaggcctcagtgatggtttgacccagactctgggagggtagcacagcttggaggagaaagggtaatgcttggaggagaaaggcgaatgcagaaccccagatgatccaagatgatccatgtaagaatcacatctatttgtatcagtgtgatcacaagcagcaattataagaatcctagtcataacaaatctccatctcagagatgaaaaaaaacagatttatgaagtcagaatacagcggaagcagtgaagaaacccatccagattccacagctatcaaggaacagtgcagggaccctaactcacgtctcccaactccaagtcttgtccattctcttctaccccacttctgcatttgggttgatgttgccattctcggtggccagagcatctaatatgaaccaggtcctcttctagtgaatgtggctgaccactgagtgggagggagaggaggagagagtacagaggagagggttcattgtgattccaggacacagaggatgcgccctctgcttcctatatcagcttgaatgttggtgtccagtaaatcatatccaccctgttctccttactctcttctacctccctgaataatctcttacaacctctttgacttcataaaaccatttactgatgagtctcaaaatactatttcccagagagatatattttctagatatctattcccagatgtatcaaaactccctaaaatgcatgtgataaaactgcatgtatcagtctactccctgctctccatcctgttccttgtccatcagaagtccaactttatagcctgtgggtcatactagatttcttccctatccttacctacaacgtttagcaggccaccaggttctgacaattgctgttccttaggacagtggaacctgctctctaccttccttccattcccttgggttacacacagtgactttctggcccacgctgcactagagacccaaagctgacctttctgcttccacttatttcttctctcactgctttcataataattcttcttaaagaaacaaattcaatcagatcactcccctttgtaaaataatctttcagggcaagtattttgacttttcatggcccggtcagtatctgccattcacatttcatttcttgtggcacctaacttttcagccttacagtttccttcatggaaacttcctttatcttgtttttgaactcaaaattttgcatatcgtgctttcactgccttgattaatttgcctttctctttgttacgtggctacttcaaatttgggaattaccccctacagggcacacatcaggaattaactcttctagagagcatttatggacaccttgcctaagaggtaggtagcataccagggtaccatgcgcatatttctgtcatagtggttattacattgtagtgtaattctacattcagccagctttatctgcctcatccacataactaggagactcttgttttctacatcttgtatgtctagtatctagagaaatgcctgagggtaggagtgtttagcaacaccattgctaaatgaatgaaggcaagcttcatatggactagtagcctctgtggttatccaagcacattcataatcagagactctgaccacggtggttataattgttaaaagtgatgttcccattgaatttcttcaccacacagctctataggaagagactcaaaactctgatgttcctacccagaaatggttacatttcgaagatgtctagttttatccaatgaagttgttttaaaattgaaactaggcatctcagctctgtgaaagcagcaaagtgcttcttcgcatagcccagcacctacatttcaatccagtctggttctttacttggtcctgccctatgcctgtgttgggtgttgggaataaaatgtgggttccacgcagctccaggacttgaggagcttggtgaacactcactcgcccagggcagcactgattcctagtgccccgcacgccaccttgcaaagccaggggcttaataaagccttgtttatgagcattctggccatgatgactcaattatccaattattcataattcacttaaataaccactaaacttgttttgagtacctgctatatgccttttgtatagagataaattagagacattctctctgcccttgtgaagcattttagggcttggagacagagaaaaatgtacaacaggcaattataatacaatggaaaatgtgctaatagaagtctccatacagggcaggttttccagactgaaggaagagagaagaatattccagacagacagaaccacatgtataaaatttgagaagggtgggagagagcatgagaggttcgaagaactgttagagagcagctgggattcatcacaacatgagagcagatgggttatttggggagcccggaagaaggaatggtgagaaaggagattgcagaggcaaactaagggtcgcctaaggtggaaggaagagaaaaaggaggctgcagccagactaaaatttggaactcctcaccttgggccctagagagcaccatatggctctggaacagccagaaaagtgggctctgcaattttccaggaaaagaatggttctggaaatctgtggaccaaatagagaactgttgaattaatgtaagaaagggacgatgaggaaatgatctggggctgtggcagcagggatggagggaagggagtgattctaaggtcattgggaggtaaaggtgcaggtgatatgcaattgtgtgtgagaacgtcagcacagaaagcaagtcaggcactcagctgcatgctgaattaaagcaggtgtgaaagcttgagaagaaatattaacattttgataaatttttttttaaaaaaatcaaaatcaatgttaaaaaagtattaacaaaatatcaaaatttcaaatagaggcaggatcagtattactgatttttcctttggcctgtggctctgctatggcttgacctggtactctactgatcctagctttatttaaacttttgatctgtcattcatcataggttttttgcattgatttcattttgaaaaaaatactgcattcaattattgtttatcttgattactttttttttttttttttgcactttcttaaatttcgtactgagtcaagtgcttcaacctactcctggccttggaacagagtagtagcaagagagagggtgatttatcaggaatgattgcaagggtaatgtcaagcaggatgcattgatgtaccagcacaatgccttatgccactgaaggacaactctgtctgttccttaaagtgacttttcttggatagcaggatactacctttcctctacccaccaaaagctgtcgcttgatactaggcattttcaccaaatgaagacatcatacagaccccccacctccaccttgacttcctccctctgagcaaactgagtttgggtctcccatgacgaaactcacgtgcagcttgtgtacaacttccctaaatgccacaaatgcttcagaacaagtgtggaaattggtttctaagctccagcagtttctaaaataggggtggtttaaaataaagcagtatgataaaagggattcctatagagcagattgtgggaaatagcagtgagcctccaaaacagaaaacctggggaaaaagtcagaaagggcatctagccattcctgagtaagggggcgtgggaggtaaccgtggtcttccaggaagagtggccagctctgtctccattaacttcagtctgggtggtgggggtgggggaaactcatttctttccatcccctgaagcttcttttcactttatatcctggcttgatgcagatgtaatatattctgtcggtgaaaaatttgggctgaaaaatattgtggcctttgaaaattgaggagggaattgggtgggggttttccaaattaatggcaatgtgcagatgaatccactgggcacagtggggtagaagtagggagggtggtagaagtgtatttctagaccgatgactgcatataaagcaatgcttgagtgaagaaaacagtagagtaggtagaaatggacatcgatatagagaatttgatactgatggattgtgaatggaaatttgagcttcaatttccttagatgagtgggagagaaggttgtcttgtaagaatatgggcttgaggtgaatatttagcagaatattgaaggtcaagagaagtagagattgaattagccaaagatatcgaacgcacttggaaaagtcctagaagatcccctgaacgtggagacggtgaaagtgtgtggctcccatctccacaattacatgatttgtgtctctggctgtgctcagctttctgggcaaaggcttggagaaggtgagtcataggactgaccccagtttgggaagacgcaaggcctgtgaagtgtggagggtactggatggtggagaagaagggggagaacttcagatgtggttaatgtcagggcagtgtctgatgtggccagcaatggcaaacatgagccgtgctgctaagcctcaagcttccaagtattatgcaaccttttcataacactagaaagagctgagggagctgtgtggttgcagggccctgttgcagggaagcaccctaggtcagcataggcagccacacagccagtgctttctagcaactagggcctctttggtcctcttggcctccccttaccatcactatgagctctgcattgttaacagtacaatctctgcttttgaaatgtagccacacagccccaccttaggttaaaaaaaattaaaaaataaaaaatccttatttacttctctgggacacatttaggaacaggcctgttatagaagacattgcctttgtagcatgttaagttcccactagtcctcctactcataatgaaaatgctcatatatgggaaccaatgatgagggcataatcctcaggttgataattaagatagatgccgctaacatttcttaaaccatgctgcatacagctgtcagggcaggagggaatttgagaaggcggtatataattaacctagttggaattgggccaagggacccaaggttaatggccctgggaatgggagcattaatgaccattaatggtcaagccctttttcatgtcgtactcattagagctaccttttatattctgtaagatcatggcctttggcctcaggaccaagggtaatggagagttgccactcccccagacaatgtgttctgcattctgacagcttctgtccagctcttgattccccccacccatcacaatcttcaggtgtagtgtatagcagatctcaacacactccagccatctgctgagccctgctgatgagagctgagacatatacatcatgcatattcatgggcaaaaattgtttcaggtttttattcaacagatcgacaaaagcgtgacatcctcttgcttttacctgtttggctctggtgttcctttctctatacagtccctgggtgagctggaatagaatctttaaccactctgggatgtgtcctccctccatcatatttgatggccacaggaatcattaacgtgaatcttcacaggcttgcacgctgccttgattgacaaagaaactgctatttttgtccactctgtttatcctttccctatacctccaaaagagatttaacctccaaaagagatttctacctcataagctaatcttctgtgataagcttttatgatgcaaatttgggagagtggatagacagagacagaactagagtaaaggagatgagggtacagatgcatgggagagaagaaaaggcagaaacagagcaaaagagaatgagaaagtaaaattcactatgggtgtgatttgtgtgggggagtcgagcatgggtcctgggaaaaaggaagcttcaggcagctgtgttgtatgtgagagaagaagcacacgcagaggaaagttaattttaagaagtctagctgatggttatcaagcagatctcttttaatcttcttagagggctacaggtaaacactggtattagttttaattgcatcaggttgttgaagcattttcctttgcatggaaaccctcaacactgggtcatatggggttctgggatgacatgagtttccacatttaactggaaggctgaagtcaaagcttcgagagaagctcaaacagggagagtggctttgcctcctccttcaccttagtattggaaatacattctgtggttccaactttcctaatgagttttaaaaactggagtgtgttgaatattgccaaagaccaagaagtcccctactctctgtggtgagaagactgtcagggttacacattcgtttcaatcctcacatcaagtctcaagagtgggcattacaaacccatttgtaaacgtgcaaactgaggcctagtgccatagagcgacttactcctttgtggtcatgaagttaataagaagcagctccactcggagtaggagtctgaatttttataataaaaggaatggtgaagaaaggagagacactgaaagtggaaattaagttcttaaggagaggcgggaattcaatgaaagctacagggctcttctccagctccccttgccaggctcatctggaggattctctaacactcagtgactttgagtctttgttgggggagtgagaaaaccagcagcagcgaagaagagccgctgtccctccgctgcgtttcaccctgcgtgaaagcctcagctggctgctggcctctgcccctgcctaggctctttctttggacccaacaaaagggcagtgggggaagcagagcctgtcttctgcccttggcaattaaggtccaggtagaggcaggacaaggaagacttctgcctggcgctgccggccttggcatttcctccacgaacctgcaagagaattcatgccattgaatcacccataatcagatgcagtgactatcatttttttgtgtgtgaacatctcactggctgaacacaaacatctcaatagccatggcgccctaattttctttgtcggagacaacaaaaccaaaggtaatgagcaggaggagggactgagtcccagggggcacattgtctggaggagtctcctgggcttaaatacatctaaagtagatccaaaagaaagcagtgattacaggctaattttctgcctgcattatgttaagtgtcctgtctctacacaaatggcaattgctttatgccagaaatcttttactgaattcctcttattggtaaattttgtattaaaaaaagagagagagacagactaaagaaaggtttttttcaatttaaaggtgagactatgaggatgccagtaaaagatacaagactggcacatccccaagagttgattttccttttcaaatgcaagtattggagaaggcaaaatggtccttcctttgaatttgccagttaaagggtggaggctcccaacttgagctggaggaggacacagcgctgcttcgggcagcacacagggttctttgctgagacagctgagggggctgaggcaaggggcagaggtgaagagaggctgatgcatttggcccttccttagtcatcagatggccatccacaggagagtgagacggacacctgagaccctcttcctcctgcgtagacactgcccctttcccaggagcaatgagagtcagcccagccatgtcactgactgcctcttcctcttccagtctgggtctgaagtcctaaagacatttttttgcatgctcttccttcattcactcctcattcgtgctgtgaatacctcctaagcatcttctatgttgcagacagtgggccacaccctgagaattcaaaatataattataagaaggaagtggaaattatgatagtcaaacagaaatggaacataagcattgaaatcagagagatctgaatggaaaattccaccaaacccctccttgccttgaataaataccaagattttatacttgaaaaatggagtgggaggaggggactgctgactcctgcctcagagagttgtggaaaggattaaataatatctttaaagcaattagcatagagtctgtagtattcaatgcccaataaccacttgttgtttctgcccttatttgaaattctcagttggtaccagagccttcccctatcccagagatgcatctgactcacaaccaccagggcatcaggccctccaggccaagaggcacgtaccttccctaagtaaaatgcaaacctatggtcctcttgacaggaggctgggaggaaggatgaaggatgaaggctgtgacatggccacctggtggggcaggggaaatttgggatcagttccaagtgaaggcaatggagatgcgagagaggcccttctgtgccagctaccacagcaggcattttgtatagattattttgcaggtgtgtgtgaggggtgggactccccatccaatctaatctcaacaactccaggtgaatgttcgaggtgaggtcaaaagacaaatacaaaagtgcaatgtcccagagcccctgaaaaagctaagccttggtctttggccaccaaggcatgtctatttctgaggatgtgtggcaggaccattcattccaaaaagaaatgaagatttatgttacatctgagaataagtagtaaattagcaataagtcaacttttcatccaatatcccctgcagacagggtattgataccaggaaggatcagattattctccaaccatcccgaatgggaaactgggacttaatttatgcttgtctgtatgtgccacatgccagtgctgaaatgggtattgtgattttcttgactggttacctccagtgttgaatgcagcctcaaggacatgactgtgaggaagagaaggaggatattggtcttcatttctcgagatcctaggcagggaatgcagtccacacttcacctatgatgagctatgtgaccttgggcaaattatttctttgagcatgctatagcctctataaaatggggattgtgacatctgacagagttgtcgtgaggttcaatttagataacacaatttaaataccaagcagaggaaccgccatttactggacactcagttgatattagttctctgacacagaatacagaatgaaggacacttggcaagggtttagtgtttgatgatgatgataatgataatagcagcattactgtgggtgttcagaaaagaagacaaacacgggactctattgcctccagaacttggcagggagttgagtgctagaagtggaaatgggggtggttgtagctttgctgattcatgctaccagaaaggcactgaagtcccagttccaggcagcagagtcatctacggcatgcaggacaccacgttgtacaagaatgtaggttcattgtgctgcttggtcactcagctcaatcttctccatctcaggttacccagggccaactttcaattcatctcctttcccagcagtgaggatgctcttcaatggggatgtctctcagctccctgacctacagccacctagcatcacctcttatgaaccctttggagcctggcagaaattgattcccagattgagtttttctggtcaggaataagcagggatgtgaaataactgaactccatacaattccgccttttggatccactggactttggagcaagtttcctaagacactggattatctcatggtcaaggtgaacatctcccatcaccctggcagcctgtcaccttcttcctttccttcttttcctttctaaccacattcttctccagcttctctttctcctttatctgctcatttctctctcatttagtcttgctcaaaattgctctcaaagattctttttcctgccatccctcttaggaagcagacgaatagcgggatgccagccctggatggaccataaataatgcataatgcccagaaagagccagagtggccctctgattacaaagagaatatcttttgataacacattatcctatttactctttgtaatgccaccagttcttcattcagtagcaccacgcacccacttgctcaccaatttgaaaccccagcaaaaaaaacagtgttcctgctgctgtctgatcctggctccaccaccaggagggcctgtcagacatcctcttctgatgcctatgctgccatccctgggcccctggaagcctgccagaaaggtggtcagtctcttctccattcaaagcatatgtttatcttaaactcttgttatagcctcgtgttttgattcttgctgaactctggagaatataaaggcctctaactcagccccctgatgtatacaaacatagtactgaataagttccatattcaggacccagggcttaatgaatactggatgccccaaacataaccctgcagattattattatttccagtttcaatgaaggaaattatgactcagataagctaattgattggttaaaggttaccaagctagtaaattataaacccccaattgaaatccagtagccatgacttcctgttctgttatcattctttctttctatgggttaggatttagaatttggagacaaggataggtgagtatattagccagggtaacaatagaaaacagaattttattttattcaagtgaagatatggtattgaggagacagtttacagaggttacagatagggtaaagaacacctaaaaggaatgtggagacactcagtggtttgtaaacaagaaagctcttgctacccctaggcttaaagaaaaagggggaagggataatgttttggagctgaggggaaggctggagccatggaggaaggtccgcctgccggatctctagcttggaaggcttaaacactgacaggtgcagctctggagaagggacggaatggggaagaggaccactttctttgttcaggcatttgccaagttcaactagaaatagccagtgagggagaaggtgatagagttggtggggtctacatttcctggcacagaccagagctggtagtggggaagagtttggaaagcagtcaacacatagcaccagtgcctggtccttcttcacagggctgtgggtaaaagagccactgccttcctacccagactctatacctacagggggaatcaccatgaatccaagaaaactcaggcttcaggggcttttcccattatgtattgcttcaaaatactccaccccaaaacttggggggttcaaacaagaatgacttatgatttcttatgtttctgtaggttggccgggtggtctttctgctttttcgtggtgtcagctggagtcactcacacagctgcattcagctcggagctcagctgggtctgaaacatacaagccagccccactcacactctaggcttttcagttctctggcacagaaccctgatctctgcacatgatcttgtgtcattttatttcctagcctgaacttttttttatggtggctggcttccagaagggcaaaagccgtcaggcctcaaaagacctatgtcactgcctgacacagcattgcctctgcctcattttattggtcagagaaacttgcagcccagcccagattcaagaaaaagggatatagtttccacttcacgatggcaagtgcagcatgtgcatacagggtgggaggaattcttggaggcctttttttggccagtccaccacagtctgccttctcactatagcaattcatgcccttcttatgtggaaaatatattccccctcacacatccagaattttcatcccattattacatcaaaccaaaatccaataatctgtattgggctgagatgtgactgtggcacttcttgggctaaagaactgtgagctgaaaatacaaggtaaatcccactatatccagcatatgatggtgatataatgctaatacaagcgcaggatatttgcaataaacactggaatttaaaaaggcaaagaacaggaagcacatcacagttactggcccataacaattctaaaatccaggaaggcattcattcactgtgcattaagccttcctgggagcaaagaattttctgtgattagcatcaagctctgcctctgtgagggttcttgattcaagccagagatccagcaggtggaccttcctccgtggctccagctctccccttggttccaaacattatctcttctccctttttctttaactgtcattttcaacttttggttgattccaccttctggcctctttgctatgccctcagattcattcttcctttttcataagaaatggcccatgtttgcagctgaataactttctcagcttgcttttttccccgtagaaagcttgtgactcaaatgcctcttttcactttgaacttccttatccctttattcaacccggtagttctcccatcatgataattctctttaaaatattatgtgccattcattgacctcaccaagggttcactctgtgctccatgccctagcataattctttcagcaactaacctctcgctactttgcgtgtgtaaagcaacatcgctatgatttccaggacttcttttgtctgacttggaaggtctaggaaacattgccttgaatcttctagaattcttaagaaggtatccttcagccacagctttgatttgatctttacccgaaggcccatattttgtgaatctttgccacctggaaaactatgctgggggcccttacgttttcttcattttttcttgaaaattggccaattctttggctcctctctcctttgcaatgcctcaacatacattactaaaagaagccacttagcattttcaattttacctggccttagccaagttcacaatgtattcacttacctctccattctccgagcctctcctctttactctctgccttagtctttttctgttgctataaaggaatatctgaggctgggtaatttacagagaaaaaaggcttatttggcttatggttctgcaacataaacaagaagcatggccccagcatctgcttctgctgagagcatcaggctgcttccactcatggtagaagatgaaagggagctggtgtgcagagattgcatggcgagagaggaagcaagggttgggggaggtgccagtctctttctaacaacaagttctcacagaaactaatagtgaggattcactcactaccgggagaatgacaccaagtcattcatgagggaaccatccctatgaaccaaacacctcctaccaggccccacttctaaccctggaaatcaaatgtcaacatgaggcgtggtggggccaaacaaaccatatccagaccagagctccccctaacctgctacatgagctcaaagccaataccacaagtcttagacttttgtcatgacagcatgacacatctaataaaatttcattgtctgttgttttcattatctattgctgggcagaaaatcttccaaaaacttagtggctgaaaacaacaacaagtatttccttgctcatgattttgcaatttgtgcaaggctcagcagggttgacccaatgctgctccacatggtgacagttggagtcatttccatggctgaattcagctgggtgcgcctctgaagttgaagcatccagaaaggccttatctgcttatgttttgggatggtctagtgcaaaaagagctaagagaaacagggcctgtcacttgaactgtctgcttgcaagattgtggaagaggcactaagaagatagtcacctggtcatgttttgtaaactactaaagtgagacattttaactgcaatcaatcaggacttccattgcttttaacctgacataacattcatcatattgcaggtggcattgcgatggcaaaaagcatttttgggattcacctgagagaaatttgagttgggatgccttgagtttgcatttaatcaaatgtactttatgtaccacacatcctgtctatgcatattacattcttgctagctgttctgctgtagggatggctttcagaaatgtgtctactgcctacaatgcagacacaagtgtctcccagaagtcacatggtacaataagaacatgtctcatgtggcccagtattggggatatgtgaagagtggaagaaatttgaaactagtctgtggaaagttctaccaagtatcatagaccttgaaagaaactcaaagtttttcaagaccaacatcctaagaatttctataacgttaccaatcatgatttgggaagctgaaagaaactgtcttgagctatcaatttaaaaaaatcagtcaactatgccagagtttataccgaattatctttctattctttctataggaaatggtaacataaaattctttgcatctgaagatgtgataaaaagtatatagctaagaatataggaaaatattacagaagtgcattggggagatatttaataacaatattattttcctggagtttctgatgtttgtgggtatattttagcctttaaaaaattattacttgtgatttctcattttaattaaatactcacatccatacctaattttatatttgtaattgcatattcttttcttaaagagcacctcaaaatggcataatattcaagccccactgatctgggcccatgttcatacctagaccagaggcttcactctgaaaggcaatgtgaacatattaactaataaagtactggagttggtattatctcccagcatgaagaaatcacgttcagtgtaaaatgactcatctgtgttgcaattctggggaggatagggaatcagaggataccagagcgagataagacaagatgaggaatgagaacagctaagatgaatgtcaccttcttcagtggcttcagagacacatatgggaatggtaactttaggccacaggacacgctcagatctggtgaagatctggggacacagggagagcaatgctgcttataatccgacaataataacataactcattttcctgattattttgtattcggcactagcttgagcactttatatgtattaacgcatatgatctgcctaacaactctgcaaggcagttttgattgccatatccattttggaaatggaaagaaggcatggagacattcaagaatttgccctaggtcactctgctggcacctgctggaactggggttccatgagtccatctgctccagaggctgctggcttaacaactcacacctttgcatttgtatagcactgtgcagtttatcaagcaattttacatacagcatctcacttacagtcctaatagccctgaaaagttggcagggcagttactgttactctcattttgtgagtgattaattgaaatctaaaattgcaaagtgacttattcatcatcacccagctatcagtggtggtattagagctgaaagccaacccttgagtgcatttcattttctcacattgtgtattaataaatttcagctatagttatcttcaaagacatctttatgtataacgctaacacagtaccttccacaacttcataaaaaggcattgttattatcccaatgttaccaaagaaaaatatgtagcttagagaaacaagtcctggtggtatggctccaaattcacaagccacactctctcctgcacaagcagccatggccccggtctacctgctaaatcccacacaggacttggcccttccgatgctaggggaacagaagatggattcaacacctcaagacttcaaagtgcacagtgggttcaggggacattaaatagatccatgtgtctggagcatgaatatcaagttgaaaaaaatgggaccagatgatgggggctttgagtaccatgatgtgaacgttaatttgcagggagtgagcactgagtatacgcagatctgtactagattctgtgaacaaactgaatacataaaagtgtagtcttaagctgcaaactgtttggcctcttgtctaggaataacaaacctgtatgagagaagcaggaaaagaagcaacttagggccaggtgtggtggctcatgcctgtagtcctagcactttgagaaactgaggcaggcagatcgcttgagcccagaagctcaagaccagcctgggcaacacggtgaacctcgtcactaccaaaaaaaagaaaaaaatacaaaaattagctgggcttggtggcacatgtctgtagtccctaggctggggctggggtgggggtgctcaagtgggaggatcacctgagtccagggaggttgatgccgtagtgagccgtgatcacaccactgcactccagcctgggtggcagagtgagacactgtctcaaataaagcaaattagaagtatttatgaaagaacagataaatgacttaaaagacaattattataatgtccaccgtgttttaagatcatggaaccatacattaaagggaataatcataaccataatacttaaaatggccccaagacccatggaaaaaaagagccctgctttctctgtgtgtttcgttttaaggtgactgagcaggtgatccaggttgcagcttctctggtggccattcataaaggggaaaattctctttgaacccacagctctttggattaatttttcttcagctcctgaatggacaacaaccacaacaacagtgctgatagctgccattggctcatggcttactgtattgggtaactcacgtgtattacatctgatctgaagccactctgcaagttagatactggtacccccatttcacagatggggcagtgaagcccagagacattaagtgacttttccaaaggataaatcacagttaaacacaggtatagaagaatgtaagccccagaaactttttgctacactgtacctccctattcctttacccagaaaccagtactagaatttcattttctattccatcaaggctgagaactcactatcatgttcacagcatccacaactgagctgcacctccatagccagcctatgtttttctctgtagcctcttatttcaattctgctttcatgccaaatttattatcatttctcctcaaataccttttattcttatactgctaaatatctgtcattcagcaagtcctatttacctagattttatcaagtactgtactcaacatgtacaaaattctccctctctagaatgcactttcccctgtctctacccttcaagatcttatatatcctttaaggttatactcttacaggtcagacacatagaaaatgtaaacaaattgttactattgttattattattattttcatcatcagttttccaataaaactttgagctcctacaatgtctaagctctgtgaggtagcagagataaaattaccaataagccatgatattgacccccaggagctatgatcaggttgtgggaggagagggctatttggcatgagcaggtggtaacacacaatagagtacggtaggaacagctaaacgtgccatggaatataaaatccattttggcattctggtagaaggctttccagaggagatactagctcatgcctaatgaatatggtgaagttagccaggcaaatacaacttccatgttatggtaaccaattgaacccatttgctggggctgggagtttttgtgagatatggaactttcagagctataactgggacagtctggggcaaactcagatgattggtcactccattgcatgtgcaaagatgataaccatggtctggcaaaatatcttgaatgaacgcataaataaatggatgaatgtttcatctatccatgaaaaaaaaatatctcctaccaactgacctccttccaaatatttgctagccaacttgacctgagtctatgtagctctgccctgcaagttcccgtccactgtgaacattcattctggggtttatgtcatagcaagattttaacaatgaagatgcagctgtcaccagaaggtgggtggaggcagctctgggaaatcactttctctctccctctcttcctcccaagtctgtgtgcttcattaaaatatgtatgacaacatttctcctcatattattgtatcacaccatccttaattgcataattcaacattttcaagggtatttggaggaaatttggatggttcattgactattatttgaaggaagctgagaattaaatttaaaaacatgagggaaaattagtagtagaagagactgattgaagggctgacatgggcagactctgagcttttgggtcctgccccctctccactttcactgtttttgggtctttgggcctacacatagccgctagttcccagcatggtcccaggggacagccagcacaacctgccacttgccattcaaagaatcctgctgtcggtagtcctctctcccacactcccccgcccctgttgtttctgttgtccttgtttgtgatttttgacatgcgctttgcagattgcgtgtttttgcttgctctgttgaatgcacacgtccttggctgattgcaatcatgctgattgggagctgtggcccaggggccaggaaagctctgcactgcctgtgctgcggtggggcttgcttttgcctctctgccccactaactttcctctcccatgatggtttcctggagcttctttctggccgcctatgcggtgctgggccagtgtggtcgatacttgggagtaggctgccctccttctcttggctcaggtgctgagatcatgtgctgcagcctgggagtgcggccagaagaagccggcctggaaacagggttgagcagggtgtgggttgctcagggcctccaaggcccagggcaaacattcaagccccagactgcttcaagctggggagggggattgggccctccttgaggctcagcagaaggccccaggttaaagtcagcttcttgctcttgctcccagccaaccctaactgattgcttccgcagggaatgtgcacaatgatacatttgacttcattggtgggatggatttgctagcaaaagagactgctggagggtgaaagaggtgtcagtttatcaaaaggatgttgagggtttgaaaaatgattgcaagaaatctgaattcttttccaactctgccgaacttgagatgtttggctaaattcaaagctgaactcattaggattgaaggaaagatgacttctgtggaagccagtgaatgtcccttgatgaagagctcagaaggaaacagatctctctcttcccacatctcccctgccactgggattttctgggtgcagttcccacagtgtggctagagagtaagaagcattttagggttctttccagttctggaatctagaagtcatagctgagaataacctagacagcagcttttacacccccttcacctcaaaggatgatgcattcaaggtcctgcggacagtcagctggagttcagccccatgtctggtgatgctgcatctgtgcacctgtcccttggcagcacttctgcaaaccctacctttctctctgggtgatgatgctcacctgaaaaaggtccaccctttgtgatagcactcagcgtcttgctgcagacaaagcagtgggaaaaatccctgggcaggccagggccggcacaaccgcagccaaatgtaaaggccacaggggccacagacatacctcatccccttcattgctcccccgaagggtccaccagcagctctgggagccataggctgagtgagtgaagaagagcaaagcccccttcactgggaaagtcattctgacccagcatcttcatcagcttatttgggggcatttagcttgttccagttcaataatgcattcaataaaaccgttagtgcctgacatgaatcccaaatgggtgtgtggctgccaggcatgctggcccagacagcacctcctccccctatctccttcaaatgaaagccaggtgatattaacatgattagcatggataatacgaaaaatgacagcaacttgggaacaggcacggagagattttgaggcctcagaagacagcacaaccaaccacagaactcaaaccagcactggaacctcaggcctctccctctggcttcctactgaacctagatgggaggtgctgttactgcattctctctagcaggaggtcgataattcagggattgggctttgcttcacagtgaggctgttcaggttttggaagagaaagtcagctctatgtgatcttctgtccacagaggaaacccctatgaaatggggcctccatctcctgcctgtctatccgtgcccctagccctcaagtttgcaccatagattactatttcttttatttatttattttttcaagaccgagtcttgctctgtcacccagcctggagtgcagaggtgcgatctcggcccactgcatcctctgcctcccaggttcaagcaattctcctgcctcagcctcccgagtagctgggattacaggctcctgccaccatgcctggctaacttttgtatttttagtagagacggggtttcaccatgttgcccaggctggtcttgaactcctgacctcgtgatctgcccgccttggccttccaaagtgctgggattacagacttgagccaccgtgcctagcccataggttactatttctaagaggccctttctgagagtctacatgatgtgtggtgcccatgttgggagtacaaccacattaaaaagtgcctgtgggcaggagcagctttgaccagagtgtaggatacagtaagttcctcttcaaagcttagcctgttaatttcctttaaaattcaagagggagaaaattgttaagtaccatgagttctgagtcttctctccaaagaaccaatgtatcagtatgttcagcttccctgttctttgttcttcattttaaagcttgacttccttgttctttatgtctccttgcccctagtttcagtaaacaaccccctcctagcctgtatcacctgctctgtccttagtcatccttagtcacctgttctgtaaccatccctcctgccaaaactactcacctcgccactccggctcatacccttgctctctttaaaatagccagtcagaattagcttagactgtgtggtccaaccctagccaacagaggaaagactcagcagtagggactagctgcgttaggaataagacctccttcccctcccttgtcaggtgtgttctctccgtttctccatcgctccatctgcgagatgtacccttctacagaagtaaattgccttgctgataaacttttgcctgactgctattttcacttggcggcaccaagcatttgcttccaacgggaggttggaagtaagggctctgcagtcagacagacccaagttcaaactctggctctaccacgtactggtaatgggacttcagacagaactgagctttagttcctgtattctgtaaaagagaggtaaggatattacccaccttccagagtggctgggaagaagaatacacacttggcttggcatgtagctaacatttattgaatgcttattaacattactgaaatcatacttttttgtactgttactttattgatttttttattatgatggttagaagtttcttctgaatcctgcaaatggctctgacctctactcttgcctatgacctttccttccttttcttccaaacatacacacacgcacacactcacacacatacacagagcaagttattgcccattacatctgctctttccctctgatcttgtttcattaaaaatgctaattcccccagcctgccttccatcttggcatttgcatatacatgagcagctcattcctattctggaatggtggcctctgggctgatctggggcctgaaagggagctctgttgggaagggctggggggaagccaggcccaaagctgccaggagggggtggccacttgctgggctcctcatttgatctcctttattcttgcttgccctctcctggaggcacctgctggtaagcaggaggatgccagctcatgccacggggacttctgcctggcattgtcttgccagtgtcagttccaggcaggagatgtgacctatgcaccctacagtggcaggaggctggtgctggcactgccttctggggaggcagcatcacttggccaagcatcccccgggacattcttttccagcacttggaggcacactctggagtccagtcgcgttaaacaataaagcacagtgattatgacagctctcggagcctggaagacattatgaccactaagcgggtgtccataattcgataggaaaatgtcaggaaacatagattcgatggttctacacattcattttggagtgagtgatgtggcagacaaagaaagcattcttgagatccatgcagtaggttcaaatactatcttgtcacttaatagctagatagcctaggtactcattggctcagagcctcggcttcctaatctttgatataagtgtaatgatgactccttcatagagtgagaggatgttgcaacaggaacagtgcctgctcacacatccgccccccactccccgtcatctccgctgtccccagcccggtctgagccactttcctatccggacacttcaactgcctgcagaaggtctccccacacttcacttttgcttctttccaatccactttccacaccatgacgaaggtgcttgtaaaaacacaaatcggatcatatcattttttcctgctttaaacactaacctggctttcccttcttcttgaggaaaaaagttcaaatatccctaactcgtcccctgtgactcctccagtctcatctcactcactcctcccctgctaacaattctccaccacacagaccttctccagtgttattaatacgctaagtttcttctgcatcagagcaaaaaaatcccctgagctcccaagccagattaggttccccttcacccgcgtcaatgcgctctgcatttaccctgtgggtttagtgtgtacttctgtgtcagttgtatctacacgtctattattttgtttatcttttattattttaggaataatttcttctctttgagaagccacatcactgccaagaaaacccctgggtgatgtgtgttccggcacaaaccaagggacaggagggctgtgtgtcactgcaaatgctgggtgcagtgtgtggtccccccatgcctgccctgcaagtgtgttgccctaggtctcaggctgtatggacctggccctgtgggccttctcactcccacgtgacatcagtggccacgggctccaaaccccacagtccctgaagcagaagttctctctcattttttcagaggaggcgggagagaggataagcaccctccagctgagaagtacgcggactcaagctcagagcagcttccactccttcctttctctctttgaacaggttgtacattttactggcacagattagaactttattcccagaatcattaggatctaagatgtatttattctataaatatttatgaagtaattcttctcaatgaaccctgttccctgtgctttatttttatctgcttattatctcctttaagtctcacaacagtcctgctaggtaagtaagtatgctgactattaccttcattttacagatgagataactgaggcatagaaaggtgaagtcatttgcttcagaccctatagttatttattatatatatatatatatatatatatatatatatatattttttttttttttttttgtattatactttaagttctagggtacatgggcacaacgtgcaggtttgttacatatggatacatgcaccatgctggtgtgctgcacccattaactcatcatttacattagctatatctcctaatgctatccctcccccctccccccaccccacaacaggcctcggtgtatgatgttccccttcctgtgtccaagtgttctcattgttcaattcccacctatgagtgagtgagaacatgcggtgtttggttttttgtccttgtgatagcttgctgagaatgatggtttccagcttcatccatgtctctacaaaggacatgaactcatcattttttatggctgcatagtattctatggtgtatatgtgccacattttcttaatcctggattaagaaaatgtgaccctatagttattaagtggtggagctagaagtcaaattcagatggtctgacttccagacctgcctagttacataaccacaatccaaattcagatggtctgacttccggacctgcctagatacgtaaccacaatccaaccagagggcagcaaaatctctgccttcaaggggtttgcattctggggagggtaacagacagcttaagggtgaataaaggcaggaagcaaatcctgtctgtcaaagagtggtgagtgttgtgaagaatgtaaaggcaggaggggcagcctgggggctttggcagaggaggcgatagctgttggtagggtggccaatgaaggcccctctgaggaggtgagtttggggcagatgaaaaggagctgtctgtgtaaagagccaggggagaatgttccagccaggagaaggggttgaggacatgtttgagaattgctcctgggctggagcctgggtgtgaggaggaacatgcaggagatgatgcttagagacctcaggctctattctgagcatactgggagctactggagggtcttcaggagagggaagctgtgatctgatttatatgttcaaaaggtcaggctggctgctttttagagagaccaatgacaatatttctgctagtccaagtaagaaacgatggcaaagggggctgttgcagtgaaagcaatgcaaaattgggtagatcttgagtgtgctgtaaaggtccagttacaacagcatttgttgcagagttggatatggagggagttagagaaagcaaaatcactggcgattgcaagggttttggcctgagcaactggttggatggtgacaccatttattaagatggagaataccagaggaagagaaggtatgtatgtgtgtgtgagtgtgtgtgtgtgtgtgcacatgtgatcaatggatgagcctggaatcaacagttctggtatgaaagtgttaagtttgagacatctgttagacttccaacagagatgtcacagaggtgactgggtctatgagtttggagttcaagggaatggtgaggctggaaacatcagcctgtagatggtattaaagtgcccaactagatgagtgctcacagagagagtgtggagacagggcgtgctgctgaggtcccaatgtctgtgtcccctcaacattcccatgttgaaatcctcaccccccagaggatggagtttggaggtgtggtctttaggaggtgattaggtcatggcagagaggcctcatgaaggcatcatgattgctgcccttatgaaggagcctcgagagagagagagtccttgctgcttgaaccaggacgtgggatctcactggacatggaatctgttggcaccttaatcatggacctctagccttcagaactaggagaaatcagtttctgttgttgaagacacacaggttatggcatttggttagagcagccaaaactgaccaagacctggagatctgggaaaaaagggagaagagaccagaaaatgaggctgaggggaggcaggagctgggagcgggggaaagtgctatcacagaggcaagttgacgaggggtgcaagagagtgaggagtcggggcccatgctgctgcattccccggcgtctctggcatcctgacccacaccccaggctgacgtggatgcatatcgctcattgcctgctcacacatgtcaggcatttgcttgttgttgaagtcatcgtctgtaactaaaacgtagcctccaaaaggcaaggacttttgcctcccttgtttattgacagatagatgtatccttggcacccaggaccagcccggcacatcagagctgtgtaacacagcatctgatcgaatgcttttgttgcctgagtgcagggtggaggacgagagacctgagatcaaccttggctttggcagggcagaagtcatcatatccatggcgagatgtgattccctctggctgatggagatcaaatcctcactggattctgttcaggagacaagggaagatgaggaagtacagacagaggaaacagacaactttctcagggaggtttatgggtcagagaggagagggactgcagtcagggtcagggaggccttggctgttgcctctttatctccagatgagaggaaataaagacatttgtgtgcagagtgtgcatgcccacaggaactctccagtaaggggagccgttgatgatgagggtacaaaggaatgagagctgatgtcctgtgcctgggggaaggtgtggaggactatgcaatcctgtgcacaggtaaggggctgtctgcaggtagaccagcttcactcagcagaaataagaggagaggttagagcaggaacatgcagggtagatctggggaggataaggttgagtgttgcagtttccatctgattgtttctggctctgcagtaatgtaagaagtgaggtcctcaccgaggagggtcagagacagcagaaggtggaggaaaggagagcaggtgcaccaggaaaacggactgggatcattgggtcgtgtcaagtccacttcatatttgaggttacaatttttttttttttgagacaaggtcttactctgttgctcaggctggagtgcagtggcacagtcatggctcactgtagccttaacctcccagactcaagcaattttcccacctcagcctcccaaatagctgggaccacaggcacactccactatgcctggctaattgtttctcttttttttgtagagagagtctcactgtgttgctcagcctgggctcaagtgatcctccttccttggcctcctaaagtgttaggactacaggtgcgagccaccacgccccactgaggttatacatttaaacttaagctaagtggcagggttgtgcgtgtttctttaatccatttggcttctctattagaggtgaagttaactggggtaggaattaactcagatgccatcaccaacccctacactgactacctttgttagggtcattagtgctttaaggccaggcgggtcagagcatgaagtccaaagacatggccttataagaattggattccagaaaaggtgctgatccagctgtctctgacccacacttctgaggactgctcatccagggctccctggccccaccagcttcctccaggcccctgcttctggacactgtggcttgtccctccacatccccctgccagtcccctttgagccccaccagccacctctgtcctcacccttcctatctctgtctcgcacagcgcatgcctgaattcagcctgtttgggttgcctgttcccactctgacttgcaaatgcagaccccttgggctcacattctggagaaaacataaacacctctcctctgttggcatggggataccctcaaatttggtggctctcggctgcccccacctgccataaatcagataggaccgcagctacccagctcagccctggtaaaccccttggggcttggcaggaatggctttcccggatcgaatttcttggcagagaattggaagggatttaaaataactgagcacaccataccacccgtttccagctccaaatagaatttggagtccatttcacacagcgctggggttctctcacccacagatggtgttaccaaaattgtgtgtgctgctgctctgtttgtctctaggcttgtctacctcgacctgcactgctggcctttccaaactcttcctggcctgcgtgctccatggccatctgggtgtcagcgtgccctcacatgtctgtcagctgccagactccctggatctctgtctattgattgatctgtaaatttcccgcactgtgcatccatcagccgtccaccccctccactcctcctgcatgcacatatgcctgcctgcaccccgctccagcctggaggaagctttctctcctcttttggcaattggcggtcatgtctcagaatccacaatatgttgattcttttcagaatcaacacaccctctcctccgcactatctgacctggctggacaacaggcagaggctgttgacatgagttgagggtgctgctctataccacagtggggtatactgcaggggaaagaggtgtggtctcagagtcatgaaacctaccttctacttgaccattgggaagtcacgaatctctgagtcattctcctcatctaagaaataggggtaatattacctgtcccacaggagtggtttgaggatttgatgatgtctctgtgaagctcagctcacagcacaaagtagggatttaaaaatgctctttaatctgtggtctatggtaactatcaaacaagtaatgctaacaacgatcatttattgaataattattctcagtgtgttaaggactttatatatttcattgtgtttaatttttgtaagacttaatgactttgatcatcaaagtatggttccccaaacagcagcctcagcattacctgggaatagttacaaatgctgaatctcagtctccatcaccaagcgttttccatcagaattggcattttaacaagattcccaagatgttgaaagtgacatcctgcgattatttacccccttttcacaggtgaggacactgagacctaaactgggtgcataatttgtcctggatcacacagcaggcagctggcaaatctaggttctaaaactggcttcccagatatcagtccttcaccaccatggcagagtgtgttaatcagtgttcacactcacgcacatgctcacacccacggaaaggacacggtggccactcagcaggttcggagcccatgatccgaaatgcccagggtgcagaagacccaacccagttgagaactatcttctccttccccagaaggaagtgcagcagcaggaacatgagaatgcaggcttctgtttaactagctgtgtgatcccgcgcaagttacttcacctctctgggcctctatttcttagatttacaaagtgggatgatttgcccagatgtaacagtgtgcctctgttattgcccttttgtctcgttggtgattctgttttgacaatcatacccataagaagcctgttggtgtttctgtctgatgtcagttatcactccgggaatggagttaggatgagggggagagagaagaggatgtaagaggttgtaagggaatggttgaattaaacctggctttccttaaaatgactcattctcaagcatagacaaatcagggaggcctgtgtcaattactccttgtgattattcccgagcctatttgtggaactccaggccctttccgtacctcattcggagggcttttctcagggggtttatggaccaaggacatctggtgcctgaggctttatgtctgttggtgtgatcatccaaactggggaagggcctataacactccaaatgctggtgcccgaatatctttaattccttctgaagggtcggggttatttctccatcgggagcactaatgggattctaataccctggcaaatgggattttttacaactgccattctgcagttactgagatggcgtgtcgctgggacagccctataaatcctgtcaactcactctgaggaggaggcggccacagggagaggtggctgcttccagtgctggcagcctggggggccctctgaggggtgtccaggttctagttctcaggatgagttactatctttgccagggagagatggtaaatcatgggaatggggcagggcacagccctagggcctcagagaagccacaggagtttgatgggaaggaggcagtaggcccctgggaaaagtgctcttcacttcctctccttttgcagtttggttttccaaggcctctgtctctgagggctcatggacacaagacctaaggatatctaccaaaagcaggtacctctgtccttttaattccaggggaacagggcccagagaaaaactcacggtagatattaaggaaaaggaaaatgcaatacagcccatctttatgttggagttaaacttgatgccccagggtattgttcccaaagacagatatttacatagatatctcatgtgcagatgaatgactctctaagcctgggttctctgtgaagccacgtcccttatatcggtacactgtttacagacaacctctcattttgatcactagaataaatcagaaggattgaagggcaagattattttctttccacttcagggatgaaaaataacatggcaggccttaaacaacttgttgcagggaacctaagttgaaatttgctcagtttttaatccatcttgaattgatttttgtataaggtgtaaggaagggatccagtttcagctttctacatatggctagccagttttcccagcaccatttattaaatagggaatcctttccccattgcttgtttttctcaggtttgtcaaagatcagatagttgtagatatgcggcgttatttctgagggctctgttctgttccattgatctatatctctgttttggtaccagtaccatgctgttttggttactgtagccttgtagtatagtttgaagtcaggtagcgtgatgccgccagctttgttcttttggtttaggattgacttggtgatgcgggctcttttttggttccgtatgaactttaaagtagttttttccaattctgtgaagaaagtcattggtagcttgatggggatggcattgaatctgtaaattaccttgggcagtatggccattttcacgatattgattcttcctacccatgagcatggaatgttcttccatttgtttgtatcctcttttatttccttgagcagtggtttgtagttctccttgaagaggtccttcacatcccttgtaagttggattcctaggtattttattctctttgaagcaattgtgaatgggagttcactcatgatttggctctctgtttgtctgttgttggtgtataagaatgcttgtgatttttgtacattgattttgttagacctaaaaccataaaaaccctagaagaaaacctaggcattaccattcaggacataggcacgggcaaggacttcatgtctaaaacacaaaaagcaatggcaacaaaagccaaaattgacaaatgggatctaattaaactaaagagcttctgcacagcaaaagaaactaccatcagagtgaacaggcaacctacaaaatgggagaaaattttcgcaacctactcatctgacaaagggctaatatccagaatctacaatgaactcaaacaaatttccaagaaaaaacaaacaaccccatcaaaaagtgggcgaaggacatgaacagacacttctcaaaagaagacatttatgcagccaaaaaacacatgaaaaaatgctcatcatcactggccatcagagaaatgcaaatcaaaaccacaatgagataccatctcacaccagttagaatggcaatcattaaaaagtcaggaaacaacaggtgctaaagaggatgtggagaaataggaacacttttacactgttggtgggactgtaaactagttcaaccattgtggaagtcagtgtggcgattcctcagggatctagaactggaaataccatttgacccagccatcccattactgggtatatacccaaaggactataaatcatgctgctataaagacacatgcacacgtatgtttattgtggcattattcacaatagcaaagacttggaaccaacccaaatgtccaacaatgatagactggatgaagaaaatgtggcacatatacaccatggaatactatgcagccataaaaaaagatgagttcatgtcctttgtagggacatggatgaaattggaaatcatcattctcagtaaactatcgcaagaacaaaaaaccaaacaccgcatattctcactcataggtgggaattgaacaatgagatcccatggacacaggaaggggaatatcacactctggggactgttgtggggttgggggaggggggagggatagcactgggagatatacctaatgctagatgacgagttactgggtgcagcgcaccaacatggcacatgtatacatatgtaactaacctgcacaatgtgcacatgtaccctagaacttaaagtataataataaaaaataataataataaaaaagaaatttgctcagttaatactcaaccccaaaattttgtaatttttaaaccccatttgtccccttgcctctacaccatgtcaaatcttccaggaggatgccagctgatgctcctttcctcctcaaggtcacactacctcagatggaaagcttccctaatgactgttctgaagttggggctttggggttgcttatgggctagaggtttccccaaagaccacttggttttggtgccactctgcatgggctcactcccaataactccgctttggtctccctttactctgtcggtgtccaatgtctgtaaattctcactggttttgcatttcttttcctaacttcagctgccttcttctcccagatacaggcagattcttccctggccttacaatgtattaatacaatgagcacctcttatccttaccagaatgtaaacttcctgaaggcaaatcttaagcaagcagttgctgagtgaataatgcttgcctaactagaccctgtgagagacaggaagacatagaagacccagttctagtttttgaggaacttacacatttcttggtgagacagtttatctccatacgttaaaaatctaagtgatttcttactgttttctagttctttaccacacacaacagtttcaccgcagtgtcttagtccatccttccattaatcatgagaggaggttgggattctaattctttctttagagataagaaaatagagctcaaagaggtaaaggagacctgtgtaactagaaaactgtttaactgaaggttcatgttcctcagcccattgcttcaagtagcataagactggtagaataagatgatgccaattttcatgatataaagacacatatctcagggcatcaaagcaagaaggaaatgactgagcagaaggattagaaaaggctttctgaaggaggtgatctcgggggtgggccagaggccagtttcccacgtctctagagtttcttctccttgtctcagtagctgagctcctggcggtgcctgtggaggaaaggtcatgggcctggaggccgcatagccatcatcaggttgaaatttacatgcgggatgaagcaacacaaactgtcccacttagggggaaagctgtgtggctccatttcggagaatgagccctacactgtgtggttcttgtcactctcgcatccctccgcctgccttgcagctcatccgcagcgggctttctactcatcaccctggctccctggccctgtacttcccaccacttcagcccagagcagcagggaatctgccaggtgaaagcaaaacctgctccaagcccagtaaagtacctctgtctgtgttttctcagcatagatggagagtggatgggtctgcttaccaactgccctttcatgtttcctagccatccaaaggacggtgcttggagccagacagatttcagttcaaatccagctccaactcttacctgttacaagactgtggtcaaactactaacttcttctaagtgtccaataacttcagccttaattttttaaaaattctaaaaaccaatttctatctatcatatcacttttatgatcatttgatgattgttgcttttattttatgaccactagacgtttataaaagtcctgggggcctttgtaactggatgaacaaatgctcagctcatcctgtgcccatctctttctgtctgctcatttccccagttttgcagtcaaggtttgtgccccagttggagtccaccgggtctgtgggggtgctggtgcagagctcggccttctgccccgtcctggcttgggtgggtctgcacggccccctgggccgtgggaagagctccctctgcagcagccagtgcctcttgattctctggaaggagccagcagccatctgtgtggaaggacagggccatactgtgtcctaaccttggttctgcctccaacttaaagtgcggtttgaggaagtcaccctctcgggaactccagttcttcaggttaaaaaaatggattttgaagagactaagacctcttcagggctgttggccaaattgagggggacagtgtcctgtgctccaggccacgtgatgagtggtgcttctaggagctcatcgtacactcctctgagacctacaccacatacagaggcatctgagcagggaagcaggtggttggtacacacgggttccttggaccagagcagagattcaggaggagccaagccatcccctcaggccccagccaggccatgagcccagcaggtaaggctgggacaccagccagtgggaagagtgcagcagtgccatgccctaattgaatcaaagtctgactgccagagaccctctgtcttcgcctgccgctggccagggctctcatgggattcatgctattaccctgtcaactccagcacaccccctcatttccctccctgcttaagaatggtttaaatcagcaatgctagtgcctccaaacttcaatctgaagcctaaggtctcatgtaagctagactttgtgcttgcacttgacaaacaaaacagaaaccccgaggttatacatattacgtgactgggtctcatctctgcttaggattgattttcctccattcccagttgcaggacaccagaatgatgggattattgtcttgggcaatcacactgtggcacctggcagctgcgtcctccacctcctttctgtgcatactgctaaataggcaacatctagttccattcggaccccagaatcctcagctcttacagcacaaatggggcatttgctcaatcccattgtaactgaaagcactttgcaaagccaatctctgtgtcagagggcgacctttcaaaatatgaaagcggaagagcctgtccacacctgggatggcaggtgcagggcccggcccctattctatggtccagaatttccagccatagtgaagccagcgccacctgctgtctagacagatcgccactgatagtggaagggaaaagaaacagcacagggtctagacaggtaagcacctactcaagtaccgagacccacaagttccaaattgcgcattccacttgctaattccaggcctaatcaccaaagctctcctgcatggaccatgagccttggggacacgagtggatgaaactgctcgacttcttgttgtgtgccagtgggtgcatgcacacggtggcatgtactgaattgattacggaaaaatcatttttgagttggttcttttgtctctcatttgttcactttctgaatatatttaaaatctttgtccatgtccttgctgccagctcctactgcaaggcctcagtagaccacgtctgctccccttgctctgtgctgcccttgctctgccagcccaggcaggggctgtcctcaaaccagagcctggagacaggcccatgtgatctcacctggatggaaagcccagaggccgactcccacagctgggtgcctcctggaggattcccacccaccagggcagaagccaaagtcaaatgccagggctgtgctcctccctctctactgccctcagtttctctcagctaggcttctcctgttccccccacagcagactcagcccagttctgagctcctgagctgatggcagcagggagggatggagaaaacagagcaggccgtggaatcctctcccagccccagcatgtgctggctgggccacgggatgcctggccttctcgcttccactctctcgtctccttagccaccttccagaccaagatccatgacgaggatgcaggcagacccccagacacctgtgtggttcctgaagggacagccccatgccccccaccctctccctgtcttgactcaaagttgcttctgcaaagtttttcctcccttggtcttgatcaatggctcaatttagcacccgattattcagtcctacgcttggcaccactgagatctcgggacatttcctcttgttcttcccagccccttcttctccagctgcacttaataccttgttttgctccgtgactggatcatttcagcctgtgacactgcatcctcctcacattctccaggaaggctccatggctccccgtccctgagcttcacaaccttcactgtgtgaacgcgtaagctgtggcccttccgtggctgaaggcctgaacccaaagtgcaaagtgagatcaattctttccaccagtagatcctgctttccagacaaaacaatataaactatcattgctgttgccaggaagcctcccttcacccacagtttggaggagacattgtgtcaagccctcagagtaggagttacaggctctgcacccatcctctggggtttccataggaggcacccaagaggtccacagaccacagagatggccaagccagctagaccggaaatactgaccaaagacagaaaaaaaaagtcctttgaaaacaagtcaatgtcagctcctccctgagcctgtgacatgaggggaaggtgcaggaatttcaagtttcttggagacaggattaaggactgagagcggcttccttcccaagtccttcttccactgtcagatacagggaagacagaatgaaaagactgatatgaaagcgctttgaacttttttaggctcaaaggagctttaaggatctaaagcattatgattatcttttagcagtgtgataatattgattatacaggggcctggtggagtgtccctggctgcatccacagagtccttgggagctgaaaatatttataagtattgttgtgtaaaggtccctggcagactgagattcagaaggagattcataaaggtagtgcaaggccccgaggttaagttttatcttaattatgtgttgggaagtggctttccagggtcagagccccaggggaagagaagcaaatgtcccttcccagcagaccctcaccctcctgacagaagcatgctctgtgtcatctttaccttggcttctgcctctggaatttatgcttctaagccttggcctaaggcttcaccaggagaaattattattaatgataataataataatggtaagtcagctgacagcgtcgctaatgtcccaggggagaaagcataagaaaattgcctctcacataaacactttctgctatagctgctgaggtgggaagagcacagatttcagagtcagagaaaatggggtgcaagtatccgccctgatatgtccagtctctggctaggcccttgacttttttaagttctcaagttccttatctgtaaatgtaggtaatacaaacatctacttgatagtgttgtaaaattccaaggagaaggaacattcagctgagtgcccagcacgtaatggccgtcaagtgacattaggtattattaatattggccttattggcagtctttagaaagcctcagagtcacctctcaataattttaaaaggcagatacgggagcccacacccaagatgaatgaatccaaatctttaggaaggtggaattcaggtatctgtattttccttactgtattatgtgttacttttttaaaaaaattaaatttgttttgtgatttatttatttatttatttaattatttgagacagggtctcactctttctcccaggctggagtgcagtgacacaatttcgggtcactgcagcctgaactcccaggctcaagcaatcctcccacctcagcctcccaagtagctgagactacaggtccctacaggtccatgctaccacgcctgactaagttttgtattctttttgtagaggtggggtttctctatgttacccatgctggtattgaactcctaaggctcaaacgatcctactgccttggcttcccaagatgctgggattacaggcatgagcccccatgcccggccttgtattttatatatacacataaagagagagggagagagacaaggtcttcctctgtcactcaggctggagtgcatggcatgatcacagttcactgtagccttgacgtcttgggaacaagcgatcctcctgcctcaacctcctgagtagctggaactactaccagcatgtgccactatgcctggctaagttttataaatttttttgtagagatgaggtctccctatgttgccctggctggtctcaaactcctgggttcaagcagtcctcccaccttggcttcccaaagtgttgggattataggcatgagccactgcacacggtgagtgttacttctgattctggatttgtaccaagaatcagaaccacttggcctcacccacagtgtttgcaaggctgcacgtagatggtgcttgtcaattacctagagtggtgcccagaactcagcgtggggaaatcgtggcattagagaatgttctcggagcccagtcctctccctgtggtagatggcctttcctgcctccatgtgagcagttaatcacctgcagcagcaacttggtgctctatcctcccccagcatgaacatgagccgttacatgttggggataattgaaggtgaactacagagctggatggactcccctgtccagaaaacaagtaaccaatgaggtaggagttctacatgggttcaaggcgagaattgtaaagatcgttttctgctggtgctagggacattattttagggatgtgtgattctggccttggaagccaaccctggttcaaagcaataactcacatgtaataaacttacagagttatgaccctaggatcggagattttctcttgctcatctggctactttagctgcatcaggtgtttaagtgtagaaatgagaaacgtttcagggagattgcacatacaaagcttcctgtggatgcccagcctaatttacagtcatttttgttaaattatcatatgtactaccatggtaaggctggaaaacgagtccattctctgcttagcttctaggtggagaaatagtcacaaagataaggcttttgcatgtggacttatatggaattagggtttagaaaatataaacaacttgctaaactttgtcacttttccaatgagctaaatggaacttattcatccccttaataatgatgtgtatttgttggggttttaaaagtaaatacactagctatagagaaagcattacttgagtgaatggatgtcctctaatcaatgtttgatttctgaagtatgcttttaatttctcaaagtgcttttacatatattatctcatcgatttacacaatggtcctgtgtagcagagaagcaggtattatgtaattcctatattctatacatagaacagatgcttagtttattaattcaggggcgtgtagtacatttctagggcttctgaattcagtcttctgaatctcaagcctgtgccctttgtgcaagttgaccctgacccttttctttttatttttttattagatggagtttcacttttgttgcccaggctggagagcagtggcgcgatctcggctcacgcaatctccgcctcccgggttcaagagattctcctgcctcagcctcccaagtagctgggaatacaggcacgtaccaccatgcccagctaatttatctagcagagacggggtttcaccatgttggccaggccagtttcgaactcctgacctcaggtaatccacccacctcggcttctgaaagtgctgagattacaggcatgagccaccacaattggccccctgaccctttaaaaaagttacacctccattgtgagaaaatatgtattgtattaattgggcattggaggtggaggactggaaaagcataaaagcgtttcttgtgtgactgctcagagagaaggtcgtttctttgtctctgtctctctctgtttcactctcatccttagtggtaacgaatctttgtgcatcctcttgggctcttttaagtggtttccacagtagatatagggccactttagattgcatttcaagattggttgctggagcaggaaaagagaatatgacatatagagtggctatctctactgataaaataagatgggcatgggggaagggtcaccaatgggagtggctctaggcatgcttcaaggaagaataaacagcctgactgggaagtctttcccagttttgcagcagacttgaatctttttggtgtgatcacaatgtctgacttctcattgcctatgctgtgtgcaaggtctgagctgctgattgggtctcattttacagatatcccaatcatgacctccaaatggatgcctgattgtgtctacacccaagacattggcaaaagattctgaataatgtgtgggaaattcagaatctggctgcctgaatcagatgtgaaacaaagactccagggtctctgtactgaggaccacagactcagaaactccctttcctttttactgtcacctccatccttggttacggcatggcctgaatatcagcactgagtgcatcccgatgttataattacaagaggaattattatgaggcaaaacaataggcaggctggaaaatgggggagtagaggcctgaatgagtcctgcttctttctgcttacttgtcaaatcctgtgtctcagatatgccctctccacagccatcctaattgataactcaagcatcactcttttttttcccttcttttgtttttaagctgataagtgtggaatccagactctggtctagtttcttctttgtgtctgctctggctcaggcagaatagccttctagtccgcagcatggtctttgaagagactttacaagattcctgtacctgtattgacctgccttcagatgttggatctaactagttcattttccagccagcccccactcttttgaacttcccttgcttgctttctcattacccacccctccctctagctcagatacccaatgttgcatggtccatctgtaccactcaatattctggatatcagcttagccattcaacttagcactaatgcaaacatcctcatttacatggaatgcacagaaggtgacattctgtctgtaacaataggttataattatcatgtctctcatttgtattccattttatagcttcttgaattgttttcacacgcataaccccatttgattattctcagagtgttgagaggtgggcaaatattctttcattccttcactcaccaaatattgattgaggggctggggaagccaaggtgatgaagacaggcaggcatgattcctgtcctagtggagcttatattctagacaaaatggattttgatttgacagcgaaacggaggctcagggaagttaaaagactcgagtcacccatgcagtaagtgcaagaatggggactggaacctggatcttcagatgcttaccccagggctccctctaagtctccttgctgtttctcagaggatgcaggaagtcctcattctgcacgtgggctgtagttcagaagtcctttttttaagctgagtacttagaattcagtacacattttcccatagaaattatgttataaatggttactatgctacaaggccatccaacaaaagcccagttaacccattgaacccataatgtagctgaagcatgctattaataggacaattccttccactgctacaccattggggaggaatttcactggactcattcaaaattgatgctgtgtgaataaattcactctttggcctttggatttcctcagtgactcactgtaggcatgacactgtgctggtgtaaggggctctctttcctccatttgcatactttcctcatctttcctgctttctctatttttgtatgtgttgcaagaagctaatgtgtataagcaccaggcttcatttgtatggattgcatgctactaaatgagtaagtgcttgtctggcttaaggacaaatatatggctgtttccatagatacccgaccttaataactaattaggacaacaacacattttccaaagcctatttcagggcatctcagatacagcatcccacaaatgtcctgtattgtaggtgcattttcctttttatttctctgcagaagtatcaataaacaaactataatgcctttagtagagactaaatgaatagaaatgagttttacctggtgatgtcttgaagtagtgctagataaatagattatgcctcacctgctcttctgaacaagaatcagatgcgctctcctcagggccacttcatgaggagaagccctgagtttcaaattgagagccaggggacatatctcttctctcttattcccttccactgccctcttctcccatttgaggcttcactgggacctagaacctgcttgttagggagctgtagagttagttatgaccagcccaactcttctttactttcaggtcttcataggaggctgcatctttagttttatttctgggttagcacctgagaggtgaacctgcttgttagggagctgtggagttagttaagaccagcccaactcttctttactttcagatcttcataggaggctgcatctttagttttatttctgggttagcacctgagaggtgaacctgcttgttagggagctgtggagttagttatgaccaacccaactcttctttactttcaggtcttcataggaggctgcatctttagttttatttctgggttagcacctgagaggtgaacctgcttgttagggagctgtggagttagttatgaccagcccaactcttctttactttcaggtcttcataggaggctgcatctttagttttatttctgggttagaacccgagaggtgaacctgcttgttagggagctgtggagttagttatgaccagcccaactcttctttactttcaggtcttcataggaggctgcatctttagttttatttctgggttagcacccgagaggtgaacctgcttgttagggagctgtggagttagttatgaccagcccaactcttctttactttcaggtcttcataggaggctgcatctttagttttatttcttggttagcacctaagaggtgaacctgcttgttagggagctgtggaggtagttatgaccagcccaactcttctttactttcaggtcttcataggaggctgcacctttagttttatttctgggttagtacctaaaaggtggtgaatagagtcttcaacttctatcgtcgtcaacagttgcattatagaatctccagataataaaacatcacatttctaagtgacctagaattcctttagcgctggcaaagaagggacttccaaaaataataatatatattaaacatctagcacatggaggcatagttctaggtgctttataaagattcttttaagtctacctgataatcagatattaaaacttttgagatattatcaataaagatattatcaattttaaggtaaacaaactaagctgaaaagtttaggtgatttttctaagatcaaaaagattgtaagtggtagaggtgggtcttggaaccaggagtccactgggcggcattacaccaagaagttcaaaggactctgggaaacaacaaatgtctcatctctttgatgtctgtccagcatacttctgtggtgtccaggatagccacgcaatttgatttatgaacatccttagatcttgaccctttcttagaaacttggggagcaggaagagctttttaaaaatccttccaaatacagttgatctatgatggttaactttgattctatcctttgtgtcttatgacagctgccagtcattgttggcatgaaatggattcctactttatctctacgacttagaagctttatatgtacactacccttaaaagaaaaaaaaaaatctccaaaacctacctactcagcattctttttttcaagtacatatgtctcagtccattttggtgtttctataaaggaataactgaggttgagtaatttataaatagaagaggtttatttggctcatgattttgtgggctgtacaagagcatggcatcagcattggcttccgttgaggtctcaggaagcttccgatcatgatggaaggggaagggaaaccagtgtgtgcagagatcacgggtaagaagaaggaagcaagagaaagaagcaaggtgcttggccaggcgtggtggctcatgcctgtaatcctggcactttgggaggctgaggtgggtggatcacgaggtcaggagtttgaggccagcctggccaatatggtgaaaccccatctttactaaaaataagccgggcatggtagcatgtgcctgtagtcccagctacttgggaggctgaggcagaagaatcacttggacccgggaagtggaggttgcagtgagccaagatcgtgccactgtactccagcctgggtgacagagtgagactccatctcagaaataaataaataaataaataaataaataaataaataaataaatgcagaagaagcaaggtgccagtctttttttttttttttttttttttttttttttttttttttgagacgggagtctcgctctgtcgcccaggctggagtgcagtggcggcgcaatctcggctcactgcaagctccgcctcccaggttcaagccattctcctgcctcagcctcccgagtagctgggactgcaagggcccgaggtgccaggcttatttaaatgaccagcccgtagggggactcttgtgggaactaacagcaagaactcactcattactgtgaggacagcaccaaaacattcaagagggatccaccttcatgacccacacacctctcattaggctcccctcccactaggctcccctcccatactgaggatcacatttgaacatgaggtttggagggtcagctgtccaaactagagcagcattccaaaaggactctgtgcatatatgagttgaaacatgctgccctgtcctcagaatgtaattaagaccccctgtttccattcctctctactatctgcttccccctttgtaattgctgaagacctttatgcctggatttttcataaattcatgtttctctcatttctaatataataataggtcaaacatcctttgaaattataagcaaattaaaatttaaattgacgtgatttatatgaaaggatcgccaggcagatatatgaaaagactacagtggaaagtgactctgggttcctggattagagagatgtataattttatgactgctaatcagcttcgtcaacgtatgttaatttactgcttgggtcatccgggatctcttcccctcccagacttagcatccccggctgacttttgagtgagttcaaatttccttgggaccattgattactgcaattactgggagaatgagaaaagattttggagagctaagtcaagccctgtacgctctcagttggcttgtaagtcaggtgaccaaatgcattgctaacagtatttgcagaacaacaagaaaaaaaaaaaagcctccttgttgatatttgtggtgtttcatttttagctaatgtaagtctagaaataaaatggtctgctgagatctttactgatatgtatttcataacaaccactgagcaattcacagttgaattgatgagctatcagggttatgtgtttctgtaaaacagagacatctaccttggaaaagctttctccagggaaacagacctatttgagctaaagtaaaacaagattaaagtgtgattaaagtgctgcaaatacgacctacgtggaaaggttggaagaactgggattatttaacctgggacagaaaagctgcaaagagatttcaggaaaacttcaagtgtccaaaaccctgactccactcagtgctttccttggcctccatagattatagagcagcaagcatgatcttaagctgtattattagggttttaggtcagtcaatggccttcaagccccagctgctgcacgttaaaatcacttagcagccatttaaaacatgctaatgcctgggttctactctagactgatgaatatccagaggtgacgaccaagcattagtatttcttaaaagctctgctggtgattttaatatgtaaccagagctatgagttactgggttaactagaggaaaacagttcctgaccacacatgcctcagaaacatgaaagcatctaccacatttttaaaatctgagtgcatcatctttgagatggattgcttgtggttgtaccagccgacttagtgtccctttttctggattggccattctttctgctaagtggccagggagcatgagatcacagatagtatctcagtgtaggttctagaaagatatttgttgaatgaatgagtgaacaaataaatgtcaagagaactcctaggacattagctgacagtttgtaatactagttgtcagaggtgggtttcgagaatggcttcccaaaagcaaatgatggttaaagtaagaaagtgtcaccagattttatgattcaaaaataacagctaaacttcaagactttcataacaaaacatggtaaagatagcagtcagaattcaaaagtgaacaaggaaggcagtaatgtagaagtgttggtagtgtatgttgatcactcctttatgaagtttagaagaaaaggaagggtcaggcgcagtggctgattcctgtaatcccagcactttgggaggccgaagtgggcagatcacttaaggtcaggagttcagggccagcctggccaacatggtgaaaaccccatctctactaaaaacacaaaaattagccaggtgtgtggcacatgtctgtaataccagctactcaggaggctgagacagaagaatagcttgaacccaggtggcagaggttgcagtgagccaagccactgcactctagcctggctgacagagcgagactccatctcaaaaaaaaaaaaaaaaaaaaaaagaataagaagaagaaaaggaaggaagaagagacattaaggtatatctggaagtgaaagaattctctgtgcagtttgaaaatagagaaatggggtgggtggggagagtaagatgctgaacagggtagcatagctgagggaggaagactgcagaggggacaaggttgagaacactgcagaggacttctcccataattcagcaataattcgggtagtgtgcctttggtctagttagcttctgttgtgtaagaaaccatcctgatttgtggatggggaatttgggcagaactcagcttggtgatcctcccactccatgtggtctcagttaggcctagcaatgacatttgcctggtgactgggctggtctaggggatccaagacagcttcgctctcacgccttgctgctgtggaaggccatgcccacatgggctccttcttctctgtggtgtctcaagatgtttctacacgatctttccagtaggaatgctgggccttcagtggcagcatcaagctccaagagacgaaggtgggggctctcggtcctcccaggctgggcctggtgctgacatgtgatcccttctgctgcactctgttagtatagcaaggcaccaagcccagcccagactcagagaaaggggaaatgtaatccacctctcagcgacaggactatcaaacaactcatagtcatctttaatccaccagggtcatgctctagaaaggataagcacagaagaacagttttgaagtagaaaatagtaaaagtgactagccatagccgctgattaaccaattaatcttgaactgttttctcctctgtaaagtgtggttaatagtaagacctgcctgagtctgagactgggttttccaggagacagaatctgagacgtaatttagcaaataagttgctgattggggagtgcccttgaaatcagcacctgtggaaaggtggaagaggaagcaggaatgaacagagggacaattcagactatgacactgatcagtggcggccgggaccagccccacagcaggggctggagtgaggatgacctaactctttgggcccttggtttctctgagcctgggttgccttagctgtgaaaggggtcaatagttcttgcctaatggcactgtcatgaggattgagtgagagcacacatgcacctgcacacaggaaacctggtacaggggatgcctgataaatgtttaaggtgatgggatgtatcctaagtaatttctgaatggagtaagggggcagtaattactcatcagagtaattctcagggggcgggtattgccagacctctacgcttaatcttgaatgtggccacctggggaagggacatggccccagagaggtctctctccagcaggattgatccccaaaagggctgagagccataaccacctgtctgccaagggcactctgggcagctgagcaacaatctctctctgaagtgggacgtgggtgctgaccccggtgcccatcacagggcattggcaatgcttataatgcgccggaaatcgcatcctgtacattggaagctctgtttgaatgtcagctgctgttgaccagtggttgccataaagggtttgcaggcgagacaagggaagtggtttgctgaatgatgatgtggagaaggaccagaagatagctagtgcttctgtgcaggggccacaccagcatttagcacagtcggggtgggccaggagtcaaaggtagccagaaggagcctagctaatggactgggcaaatttggaaaattgctaatacattcacagactggtgtcagtaaggtggcgctctcttcactgtgtgaatgaatgaaaaggtcatccgactacactgctttgctttcccgtgattattcagcatcactggggcatgaggtaatgggaagataatgggctctgggttcagatcccagctttgctgtttcctagatgtatgaactttggcaaggtaattaatctctctgatcttcagctccctcattttaaaatggagatcacaataacaaacttgtagggttacttaacagtaatgtgtgtgtgtgtgtgcatgtatatatacatacactttgcctggaaagaaatgcctgagatcaacaagtaaacgtttctatgctacgtggagttacttgcaaactgtctcatggctccattcagaaattacctaggctgcatcccacggtgttgagattcaacgtaaacatttatcaagcatccattgtaccaggctccctgttgtacaggtgcaggtgtgctctggctcaatcctcacaacagtgccattaggcaagaactattgacccatttcacagtgaaggcaactgagactcagagaagccaagagcccaaggtgtgagttagcacataaatgacacagtcagaatatgagcccatgtctttggactcccagtctgacccccactttactgcagcgcagtagaaaagacagtcaccctaaattgaggcacaggttaagtatttctctgcaccccagctggggatggctgattgggcaggtgtgggtccacagtggtactcacagtaggacaggtcaggtgtgtgtttcaggtgggctaatcaccatagatgggagcgtgcatctccaatgtccgcttggattgtcagctttctttggaataattaagagaaggtaaaggaagaggaaaaggagtaaagaaatcatctttgtacattttaatctgagctgttttcgagcagtgtgataaggtaggttgtcgaaatgtcagcttctccttatctctaattgacttaagtagaggcagctctaatccttgtgtgcacaggagcctggaatggagagatgaggccaattgattcctactttttaattaacaggtgagctgcttaaaaacaatagtatattgggggcaggttgggaacaggaaggaatgtgagggagggtcatctccaccacagtggcatttagagaaatattaacaagtgtcagcatttgatttgaatcaggggctggagcagagggaaaagttatgtcttatgcatgggtgtggtcacaaaagactgctgccaaagtgacaaaaaatatttatacttctctccatacacaaatggaaagacccttcgatttttgaagtatcatgagggagacctcgaggtattcccttgtgcaaattgctcctcatactgtccccccatgttgcagccaggagcagtttagttggtgatttcagtcctatctagtccgagcaatgacaagtcagcctggcaacctcttacaagtctcacccagccagtgcatcaaatctggaggaactttgcccacactgtgtctgatgtacctatgtgtaacccccctggtctcccagagctgactagctattctcgtcgtatgtgctggttctaaatggctaaggctcctgtcctcattcccttgggtctccttattctgaacccaacctgtttggctgatgccctcattccctacaaaacagtttttattcccccacccctgggggctggattttatattctggacccttctccccttacttcatctctagttctataaccaacagcttggtgacatctatgatcacagttctcttctgcattcactgcacatgaccaccacctggatattcttatcaccatgcctcttccatttcccaaattagtttcctggcatactcttacctggatggattacactgagatttgctctatttcctggatataggccattgaactctgttctgccttagttggggatagagaaggaggaaaaagcctcattattgaatttgcttcccaagacccatccttggaaaaagccatcttatgtaatttctttctttcctgctatttctaacatcccagagttcttcagagccaagcaaccatggatcatgatgcttacaacgttatgggagcatgcactcaaatacacgggacttttaactagtgttcttagtatattaatagatgagaggcaggggtgtggactagacggtctctgaatattttcctttccaggatttaacaatctgactctttggtagatttggaaagcgataaatcaaataactattgaggatgttcagcccattgatcatgtactagttgagtatccctaacctaaaaatctgaaatctgaaatgttccaaaatctgaaatgttttgagcatcaacagaaggctcaaaggaaatgctcattgtgacccttcaagttttcagatgagaaatgctcaactggtataatgcaaatgttccaaatttttttaaaaaatctaaaacctggaagacttctggtcccaaggattgcagataaggtgtaactttcacctctctatctttatgcttgttttcattttgtctgtttttatttaacttcttaaaatcttccccaaagttctgttatcagggagacatcttggtctgggaatatgccttccctcttcaatagaattcatgtaagtttcctgaggattggcactgtgtttgatccattgagatagctccgtaataaaaataactggcatttattaagcacttactttgtgtctgaaattgtgctgtgccctttacatgtttagttcccttaatgctcacatctgttctatgagagaggtgttcttcttatctgcattttataattaaggaaatagaagctaggggatgttaagaaactttcacaggttcacacagctactcagtgccacagatgcttcaccaatatgcaatacagtcttcctgcagctatcccggtgcccatgatgacttcttattctgtgtttgttgaatgaatgttgtgttaaggcatggattctgtttccagttctgctgctaactggagtaatctcctcgaaataattgagctcattctttttatctaccgcctcccacagatcccagtacagagtaagtattcagtaagtatttaataaatgcatgctaaataaatgggtgaatgagtgcttgatcccagaattctcttctacatctaacagcctatgactgtagcttatatggatctcctcttccctgacctctcatagcacacttgatgtttagacatttgatttgatttgatttcatcttttgttggttctaactgtttagtgtgtgtgttttgtatttccgaatagattacattttatttccttggtattccccacagtgcctagcccagtgcctagatgtcatgagtgctcagtaaatatatattgcaatgggattgagtatcgcttcagcacacttcaagccagaagaaacactgaaattagtcacctcctgggctattgttttcctctttagagaagctgtcatgcagtttctgctaaacagatgttttggacaggtcagggagcagaatccaggctgcggctaatggcacaatttgacatcctgccacagtttacccacccatctgcccataagggctggtccccagatagaaagggtatttacgaagctcttagtaaatccagaggacaatcatgtaaaagatagactcttagataattgataaaatttctctgagtgagtggaacccttaggttgttgtaaacatgtgtacatgcttgcacgtgcacacacaagactcaactttgaaccttgagggaaaaattagactctcaaccttgctcctttctgatgaatgggaacaaaaccaattctcagagggtaaataggatggggaaatgcagacaggctcatcagtgcccaaggaaaccaagaagggccaccggagtgtcaaggctctccagggaaaatgtgggtttctacagcatgggagactccagagactttaacacgcaccaactgaaatcaaggctgctcggtgcatgtgttggtttcatggcatggatatttatacaagaaagataaaccctctaggaagtgattaagagaaaaatcaaaagaaagactgaaaagcctgggcctggagtgacgcccacctacccttagatacctcccctgtacctaatggacttgatattctttgcaaataggcataatcactactgttttgcaatttcgtgaataatctacccttggagggaatgaagtttcttatcctattctgccagcctcctcagccaccctccctctcccccagcctataatctaaggactccacctctccccctcacacactattacagagtttgtttgaggagtgtacaagtgccttctagaaagaggcagactgggtattcgtttactctagtgctatcatccctccccattggatgcatctgaggaaggtgaattacttggggctgcctctatatcttaaaatccttccacacgtcagatagaaaatcactttgcaattatatttttaccaggcactttaaggcaaggacagtgtccccttcatctgagaccctctggtgcctggcacagggcatggtgcttagtaggtatttaataaatacttgctgagtgcatgaatgaaagaaattctaggaaggtttgagatatacctagactagtgtggtggatgttttatatcctttttaaatctactttctaccctatgagaatgttgagcatatgagaattcaagggcaaaaagaaaaaagaatgaatttactgtgaaagtcatctagtaaagttgagtgcctttctcaaaaaaaaaaaaaaaaaagactgaccagttcttttactgggggacttgaaagcttacaaaagagaaaggagggtgggaaaaaggagggaagggaaaacactttccccactatagggagggctggaactgtgaacaaaagccctatgattcacccaagaatagaagcttaaaggactccaactacatgccaaggcgccagaggtcctgccagcctcagctcatgtggggcatttgccctttgatgcagccaagaaagggatttcagcagcaaatggtgaccttagaacagctgtgctggagggccaacgacccccttaacctcaccctgaccctaactccctcccctcctaaatgctaaagggagcaaatgaaagagttaatgattagactagaaaaatcaagactgtgttgtccatagaattacttatcagaaaaaaatacggaggcaattaaggaagaaatgtaaactataccttgctagaggtgggagagaagggagaacagtagtgggaggtagggatgaccagtgagcacagagatgatggaggcttctgcaatagatggctcagcacacactcagtgcctgccacgagcaacggcttctctggccaccatttaaagggaacctgttatttccacttcatagatgagaaagctgaggctttggcaaagccgagtgacaagaccaaggctccactgccagaccagagccagaatttttaattcttttagacaggatctcactttgttgccaaggctagatgcaatggtgtgattatggctcactgcagccttgatctcctgagctcaagtgatcctcctacctcagcctcctgagaaatagctgggactataggtgcatgccaccatgctctgctaattttttttgggggggaggtgggggtaaagatagggtttcaccttgttgcccaggtggatctcaaacttctggactcaagtgatcctcctgcctcagactcctgaagtgccgggattacaggcatgaactgctgtgctcttcccagaatcaggatttaatgctaagtgtgtcagatgtcattgcaaagtgtagtgaagtggaacttaaggagggaaggaaacactttcttttatctttcttgatgtttctctttcactattgcaattgtaacagctttctctgagctgttaagactgcctgttctcttggcatagaactaaaataaaactaaacataagccaacctgaataattaaatatttatcgaatttctactatgagttaggagtgttactctgagctggggatacaaagtgagtaaaacaccgaggtagagggttttcataagatggaggtgaaatgctttaagaaagcaagtatgggaacattaagtcttctgataggaggggaattaactgaagcttctgcaataagctgttattttggagggcaagatagggaacggcatttcagacagaaggaaccgcatgcacagaagtgtggagtctgacagctcctgcatttcaagtgcagggattcctccaggctgtttgctggggagaaaggaaaggtcatagtcagcctgcaagatctgctgccttcatgtatgtgtgttgcttggtttttggagtagtggtgtttgtggtgattttcatttattgtagtaaaatatacataacatcaaatttaccactttaaccattttaaacgtaaaatttactggcattaactacgttcacagtgttgcacaactattacaaccatctccagaattttttttaaatcatcccaaacagaaaatacatccccattaaacaagaactccccattctccaccccactcctccagctcctggtaactttctgtttctctgaatttgcctattctaggcattttatggaagtgaaatcattcattcgtcatttttagctggcttgtttcatttagcgtaaggttttcaagatgtatctatgttgtagcgggtatcggaactctactcctttttgtggctgaaaactcctccagtgtatgcatatatcacattgtgatcacccactcctctgtcatagacactgggttgtttccactttggggctactgtgaataatgctgctatgagcactggtctacatgtatctgttcaagtccctgctttctattcctttaggtgtatacccagaagtggaagagcagggtcaaatggtaacttgacgtttcatttatttgaggaactgctaagctgtcttccacagcaactgcaccattgtacattctcaccaacagtgtacaagggttctggtttctcgacatcctcagtagcactgactgttttctatttttctttttacataacacattctaatgggtgtgaagcactatcttattgtggttttgatttgcatttctctaatgatcagtgatgctgaatgttattttcatgtgtttatggcctggtatgtatcttttttggagaaacgtctattcaagtcctttcctcttttttaagttgagtttttcattgttgttttgttgttgaatatataagttgtgactaccaggagatctagtattggaacaaaatgtcaccactaaaggtgcaggcttatttttgtttaagtttaataaaacacagctctgccttgctgagatgtgagactgaaaaaaatatttaaataatttttattgttgttgttcttgttcttgttcttatacattttcctgaataagtgactcttctagactcccccatggccaaaagtaataaaactcatagcagaagtgggaatggcaagctaaataacaacccaggaaaaccactgcaaaatcgtctgcagatgtaaatcatactttgtgaaagccattggattagaaacacattatccttgtctgattcgctcacacccacatgttcctagtaagcgtcgagcgtgatttacaccctgacatttaaggaactgggaaagggtgatgctgcgcggccttgataaatgcctttctctgtgtctgttacaccagcccaggagagaatggggtagacgtctccatcactgaaatggggggcctgggccttctgcttaaatggcttctctgcccagccctgactcaatcaggaaaagcaaagtagctgcttggcccaatgactatagcccaggattggaagatcagaatttctggcttcaaatcctcacctgcccgtgtcattgaggtgggcttagagcatcccttctgtgaaatgggggcaggagtcgtggctacaggattgttttatgcttcctgtgaaataaggcaggttctacatgcatagtcaatctgccaggaaatacagttggagagatagatgctgcaggaggaaagaaagctcacaacaaggggagaagaggctacaagcagccacgcagacattgaaaaacaaaccgcaggttttgtccagcaacaaaagccaatgatatctaagaactagaagtgtatttgctgtgttttcccatagatttgaagccccctgtcccacgacacagtcttccccacccagggagggatccagggacgcgtgtatttctccgttcacctctcattccttactgggccttggcatttccaggcagtgctgctccataaacactcatcctaatggctcctctggggtctggaggggggcggttagctgcattcgtgaattcagcattcagtccctcatatccttcaattcaagtgaacagctggcagtagatagtgatagcaaggaaagaagccatcactttgttggatgtttccctgaataataagtgaactgcttacgacatttctgagagcatccaaacagccatcacccagccacggccacgaccaggctactcagcagggggagcagcctctctagagtttgaaacatgggtgaagtggaagctctcctgatgctcatggatatgaacactaagacatcagaccagacacacatgcacacatgcatgcacacacatgcacacacacacacgcaccccacacactttagaattaagttttagttattagcttgtgaagcatccctgaatcttggtcccctcctctttaagatgggggtaacaccttaccaacgatctcctggtaacattaaatagggcaggatgtgagacagtctctggtacatcataggttttcaaaaatgtttagtcctttagctcctcacccaacataaaagaaaatcttgcgcttgttcctttgcccagataacaaaccttattctgatattttggggacagcacaggactggaagaaaaaaagaaacttttctaaccgtcacattgatttcccttttgggcacacagagccattactgaaaagtcacttgctgaagtggttgtactgtggcctcttcaggaagggggatgtgctaaggccaagccaggctgctggagtgcctggagcacaaagcccttctgagcatgctgagcccttgatgactggcgtggactcggcccccactccctgcacaatcatgcagcacaaatccctgtattttcaatggaaggagccgctccagtggcgctgaagaaagatggaaaaaatccttttcttgcaggcaggtttgctctgcaaccaccactgaaggtgttttaaaattcaccttgagtttgcctctcaggtccttgatgctgctcgcggagggaaggtagacgaaggaggctcgttcgtctgcgtgccattgtgtctagggtggtcccggggacaggtgttagctctctgggacagccaaaggacgatgggccctcagcagaaggaggacttaattaatcggtgcattgattgcctactgtgagtcaggtgctgtgctagtggaggcaggggaacaaggcactatcttgtcttccggcatcttaaattctagccaagggtgtaaacagttatatggcaataaaagaaataaataacaactcaaatcaataatatgggaaatgtcacactatactctggtccatgattgaaacggagaggacattaggggctatgggaagagatcagttattagctgcttcctgcaggcctctgaccataaaacaagcaaatatttctaaggacccctatgctcatcgcctcgtctgatgctattttgaaattcttgtcagtctgttaactgctatacaaatggcataaaggttcttatgagaatccctgtcccctcccattccaggtgcacaggcttcacacttaagtcctcaaaggaaagaaggcaaacattgcaattaccccaagaggagcttagcatgccacatgctctgtgtgtatctcccttggaacagttatcacagagccttgattctcacctgcctccctcatgggaccacagactattcaaagaaagggcctggtcgaatctgcttctgtagcttctccttggccaccgcttgggataatgactgacacatagaaaccacgccgaaaacatggttgaacgagtgcttatagaatgctactgacttactgtgttgccactggcatataggtctgatatccgtggaagaactgctaagagtggacaatgttttgccagaaagaatgaatgcttccttgtcaaaaagccagtattgtaacagaggtgtgggttgggtggttgggtagtagcactcaccttatttccacttttcctcaatagaataacttgcggggtggggtctgtgtttaaccgtatcttccctaaggcagttccaataggcaaatgggtacttgcaccccaacagccataggaggagggttcttgttcttgttcaggttgggcagaagagatgggcaggggtacaaggtggtaaagtgcaaggtacttgtacccctaaaatttcccaagcctgctatgtgaatgctgtccagccctgatggcaaatcagaaaagtggatgcccaggagagagcaaaccaatggcacatgagcagacagcaccaacaatgagcgattatttgtggagcacgcattacatttactcagcatcaccctggttactgggggacatgcacatagagtatggagcccacaggtagtaagtgctttattagagtttgttaagtaaacatgtaattacatagaagataaactaaagtttttattatttttatatgaaagttatcaaacatacagaaaagatgaaagatttttacagttaagacccataaacccatcactagattctacaattaacacttaatttaattctctttatcagaaatttacctgctactcatccatcaatctgacacttttgattgtataaaggtagattctacttgaggaaacatgatgtatacgcatgaaacaattactcagtattttctaggacaacgctaaatagtgagacagaggcacacgtctggatggagttaagaaggtgatcatccgtgaggaataatatgttcagagactgtgtcatggagggaagtgggcctggaagaatgtacaagatttgcgtaggaaaagggagaaagggtggtctttaggtgtgcggagtcatataaataatgcccggggggacccagcccagaggaaaggtgagtggcatccctctgcccagtgttacacctggcttccagccagcctgaggctgttctggtgcccgtgaactcagaccaccctcatcatcctaaacatcaccgacctgggggatgaaagctcagtatgaatacctccgaggcactgcagaccttgagggagctgggtgcctctcttgctgagtgactcatagtaggcattcaagagaaaggtccacagggatgagcttcttcatctagagtgaagtttaaaaaaaaaaaaaaaacaattgagttggatatgtgtgaaacatgggaaattgaaaaacaaaaaggaaatgagtgaatttgaggccccatcttgacaacccctgataaagaccagagagcttgtctgcctgtctcccaagcaggggcagtaacatagacctgactgaaagcaacacgtgagcctgaggaagagctgccaccttccggtggggcacccacaatagacagctgcgcagggtataagcaacttgtgcgtccggggctgacagagccgctaaacaaccacacctcctcccaggtgccatcttgggaagaggcttctgaagatcagcttcaaaaggctcttattacttaaggtccttcctgggacatttgctggtaatgggagtcagatgcaatcctcgcttgtgcttaaaaggcagacaagatggtgcagagcaattactgagtatgtctgcacaattttgaaaaccagctacctgtcccttggcaggagaggctttggctgcctgcagctggaatgctctaccttgcctttgtttttctcttttcttccgctgtctcccggcactgccctcccaattcacctgcattgtttctacctccttccagtcactgcactaagcatggattccatctgttcggggctccctggagaaggaacacacaccttcactctgcagtagtcacccagtgctgcgctggtcagcacacaagcaggggaccctgtactgacagaacaaaggacagctgtcctgtgagtggtccagccatgctcgggccgggaggaattcatgcagcacacaagagggataagcacattcattttgtgacgcagcctctgtgtactttgtcagcaaaatggagaacactcactattttctctggcttttaggatttccatatttattgcttgtttgctaccactggggagaagggaagaggagaaaacaacaactttcttcatttgaaattttaaaacatgaacatgtgaggtttaccctccctcccctgttcccctgcaattccagcaatgcacaggactgtagaatgttacagctggaagcccttgagaaatctaaacaatagtgcctcattttacacgcgagaaaatcacggacaggaggtgaaggggcatggtcaaagtcacatacctagttagtggcagccctgagactagcattggtgtctgcagaatcttatttttcttattgctgtgctatgtgggttctgtttctattcaagtcaagaatcctaccacgtgtaggagatcctactctgtatatggtactgtgcaagacgctatccactacctgctttaatcctgccagtgccccgctggggtaggatttacttccatcggttcagttgttatagttagtgcctgatcacggggctggaggagctctggagcagagctcaggcaaaggctgttggttctctctggactgtcctgtcctgtaaaggtggacatacaggataaacacgaagcagtaaggagcaaagtgcctggctggcaggaacacactagttgtttgttaaagggcaaggtgggaatgatgttggtcaatgggtacaaaatttcagctagagggaataagtttttgagctctattgtacagcatggggactacagttaataatgtgttgcacatttcaaaattgctaagagagtaaatttcaaatgttctcaccataaaaataagtatgtgaagggattgggcatgttaacttagcttttttttttttttttttttaatttttttgagaaaaggtcttgctctgtttcccaggctggagtgcagtgatgtaatcacagctcaccgcagtctctacctcccagtatcaagcaatcctcccacctcagcctccttagtagctgggacttcaagcgcatgccaccatacccagctaatttttgtttgtttgtttgtttttgcagagatgacgttctacaatgttgctcaggttggtcttgcactcctgggctcaagcaatcctcctgcctcagcttcccaaagtggtaggattacaggcataagccaaaaagccaatccatcaaggagccaggaaggctttgcagaagttccttctggaagaatttcagccaatagccaatattgaaggaattagagggaaggtatttcaggcagaatggagaggaagaatcaggatgtgttcagggaagagcatgtaggcgaatgtgaatggggatgaacgcttgtgcaccaatagagaaaagtggggctggaaaggggttcagtaatttatgggatgatattaattggggcccatcatgtttggggcactcttgtaggcctgtgacttagcagacaaggatgggaagcacctactcacacacagatagtgccgtgatggccagggcctgagagcctaattccatgggaccatttgaggtaagacctgaatgacaagaagaagtgggctctgagaataatcagggccagagagctctccaggcaaagaaaaggaaagcaaagggctttgaggcaagaactagagaccctgtggaatgaatagaggtggacttaccagcaggagaggagctggggcatgggagtggaggtgagaccaggcagagcctgcagtgcactgcaggaggttgaactctatctgagctactaggagaatgagaggccctatgttatctggcctctgcctctatcctggacctcatctccatgggaaaaactcatctctgtttgtgcccaagactcttccagttttagcactgaaagtctcaaatccaaggaacacacgaagttccaggcaggcgggcagttggtcaccttagctcccacctcatccttgctcactacggtcctgtcacaacaatgtgggaacatgctgtggagtcccttaaaaagctctggctgattcattagaaaatgcatagcaactcaacatttctgaaaacaggactaacataattaaagctatttaagcttgttttttttttttttttttttttttttttgagacggagtctccctctgttgcccaggaaggagtgcagtggcataatcttggctcactgcaacatccgcctcctcagttcaactgattctcctgcctcaacctcccaagtagctgggactacaggcgcatgccaccatggccagctagttgttttgtattcttagtagagatggggtttcaccgtatcagccaggctggtctcaaactcctgacctcatgattcatctgcctcggcctcctaaagtattgggattacaggtgtgagccaccatggccagccagctatttaagcattttttaaagatactgacgacctccaaggccattcaacttacataaaaatgcctttctgtggaaatttgggcattcctttggctatggagagggtagtaggtcaattggcatggctgaatataaaaaagatcttctccgtccagatgtttctgttcacatcctcttgtgcagcatagtttggaatatttcatcttcattcttcaagacttaaaggtgtatcactacagtaaacagaacttaaaggaacaggcctttgcatggcagcccagctgaatctgcacaaggcccttatctaaagccagttgtgagagaaatacagtagcctctgtgctcattacctctagaattgcattttctagcttctcattaggaagcggtgacatcagaataggaccctgcccctttaagagtctttcccaagataatgggattcatgatctcacaatcacataaatcactgccagcccccttgagtcaattcatacttctgtagttcgttagtggcacgagaggaaattgcatttattataattgcctctaattgcaccagattagtgattacaattattgatggcagctgattattcattaggcatcaaatcaatccccgtgcttcttcattactcgaaacagtaactctgatgagaggtctaaaggaggccatgtccaccctttccactaaatggcaggctgcctccccgtcctgcctcgaaacaaacacctgaaaataatttaggacttaaagtgacagagaaccatccctcgccttccgccatgtaatgcctcatcccgaacccagcactaactgatgaaattacggaggctgttaaacatcaccaaagactatttggaggtcccagaacgctccagaattgctagcttttcctggatgcccttcttggttgcaaaatgaaaatttcagagtttcctgggttacttctggaatatatgttacctacaatacataaagagagtagaccttacagccacacaggccagacttaaatgagctatgtaaacctagtcgattttgtgagctatgtaaagtcagtcaattttgtgagctatgtaaagccagtcaattcgtgtgtgaatttttgggagctatgtaaagccagtcaattcacgtgtcctgtctgaactgtagaatagttgctagattgtgtataaacaagcaatgagatctctgcttctcttgttcaccatcagagtctatcatctaaaatagggcctgtagagaaaagaatacaatagccatctaaggagttaaatacctacctgcaggggttgtgatgatggctgaattagataacatatttaagactttgtgttgtaccaggtaaaaactagttgctcaattagcgtcatttcctctctcccctacttcctccatgctataacatctaaatttatatcctttatccagtgtgtctctttatacacaggctcaatgttaactaaatttatctttttggtgtgttcttcttggtgaacatcagtatatgtgtaatagaagtgcagcttccagaagactgttgcctcatttactggtagctacagcatgccaggcaccagatctagagggttagagagatcaacagagcataagtattgaccttgaacagctgacaactaaatgggaatgattgtccattctatttccatgtgttgtttgcattaaaggaatatccaagttctaatgagcccacaggggatggagagacccggcacagctcggaaggtcaagaaggcctcagagttagcttttgagatgagccttgaagctgcataaatttttccaagtgcctaacaggtcactagccttccaacacaccatgtagcacctgaagagacaagaagagagaaatgagcatgtcttcagaactgcactgtgaacttctaggtgcttgatacatgaagacagtgacaatgttaagtgccattttccagacgctcccatgggtaaaacttctgtaactaagcaatcttttcttctcttagctgctgacatctcagaaatgtggcgacatcttgaggttttcttctatgaacttctgtgaaaccttatgctgcctttggtgacacagaaccctaacctatcctttcctcaaattcccagctgacccaaatgtaccccctattttagcacccacatttatcagctccctctacttctcacaatcccccctacttccactagtgagttagttcaagagcctaagtgtctccaggtagcagagacattcagagcacaccattgtctatatcaatgcaggatttcctgaaaaccagggagggagggaaggaagaaagagcctctgggtgaggaggtgtgcagcctggctctttgtcaagtctttgtcccacgtgagagtcggtgctaatttccctggttgcttaggcttgagccctgtagtatgtctgacctacacccagatcctctagggatgtaagcacagtgattcccaaaacaatccaaaatacgaggcccatagcctggagaacatgtccctggtgccccttcctctggacgccttccttgcccacatggttgccagttacgctgcctcccagggagctgaggatgaacacgtgacttctcttagcagagtgaacgtatctcctaccttaagtctcttgtgtgtcctacttgtgagccagttgaaacgctgccattttctccagagactcctctctacatcaagaccatgtaaccatgcaggaagaaatcaatcttcttttctagctaacatgttccattacctcccctgttttcaaaacttcccataaagtggcagtctcctctctgaaggctactcttttagacaggaaatacgcagggatagcatcacttccagagaaacaagagaacagactgatagatcagaacaccagataatgtcttccctttcttggcaacggtacatatccctaacctctttcccaagacccacagaagagcagggtctctcctgaagggcaacaggacactgatccactgtcttgtaaaggaagttgtgttcagtgattttctgattagggagaaagttgctacaaccagcaccagaggaaagctgtctggtgatcaaagaccttgggggtttgcctgggctacttttggaggctgcccaaagcctgctagcagctcccacatgagctggggagaggctctgcttccctctactccagcacagcttcccctaattctgaactttcagagaagcacaggttcgagcgctctcccttgcccagtccttcatcagctggtgcccgtagccctgcatcatcctggtaacagttggtaaacgagtcccagtctagccgcttatgcaggatggttgtgcagtaagaaccttcatccttatggcaggcacattaatgccaagtttgctcattctaattaataacagttagtaaacaccaaagagagctaatgatgattacaggccacagctcctgcgtgttagcaaacacaccaggcaggtggcctctcgtctcttcccaggaaagaggctaggtcctcttcttgcagagatgtcttgcctcctcaaggcccctaccaccatatttagcaaatcttgggttacttctcagcctggaaaagaccaagatgcatgcaggtcagtcccatggaatggatcatgggctgacttcaagattagaggactaaagaagcaggacctttgatcttttagggtttccagacatctctttctggcacttggaataaaacaaatttttcttatttaaaaaatattttttccaatttcaaagtaatacaatttgcttcaaaaaattaaaatactacagaagcatataagaagaaagggtgagtctcccttcgtcctctggggaagtgggattcagtgcctggttcgtttgtctacagttctcatctcccctacctcctcttctttctccagctcatatttctattcctggtacacaaagcttcccattctactaccaaattatccctgttgtgaatcctttattccccatttggctaagcctttactcatcctctatccctagatattttttttttctgactcaaggattctgcctatggtaatattttctgtgaccctgaaggcaaaatgagagttcaactccatggtggcactaggatatctcatcttggaatgttttcttctctgagttccaggggttgtggcagttaaacataattacatccacttcccgtcattcagatatgaacctaaagttggagaatgttttatttcctgctccgcagccctgggcatacaaggacctgtgaagagtggacgtgtgagtctgacagagcctcctgggggcgccgcttgctctatgttttgagccctccaggcgaatctctggtcatcgaatcagataacttgatagcagtgggtggaggtggtttgaggaataggacaggccacggtggtttcagaatcttaccaatagcttgatcattttcggaaggaccccagacccctctcaatctgtcattatttttgttgttcttgttaatcccatccttctttttacgaaaatttagcccacggggctgcaagggtaatatgtcttctatcactgtcactgcaattcaggtaatattttctttctcgctggactattaactgtatcccactggaacccattctctgagagtttaagaatgaaaagaatgtaaataaacagtgaaaatgggtatcatttctaaggatgtttataaagtgatccaagcagatactcaggtataaccagaatggcttatcttaccatctttttaaatgcatgataccttttccctctgtttctttgtctttttctttttcttttttcttgagtctgtctccttttctgtgtattagcttttcctccatttttttctccttgatgactttttttctctcagctttctcattctctttcctttccttttagtcacaataaagaattgaagggcattttcaagtttggtttggttcattaaatgcatacatccagatgtatggatttattcatccatacatctatccatccacccatttattccaccagcattcactgagcatcagtcttcttgacatcagtctctttgctaggttctcagaatagagagctgaacagttgatccctgctctcaagccatactgaatcaacaaagggagagagacatgaaatcaaagaaactattaaatccatgaaggacacaatgggagttttaagaaggtgatgagcaggtctatggggacatattagcgaaacttcctaaagcaagtgacctttgggctaaatatgaaactgagttgaaggtgtcgtcaagtagaggaggggcaggggcctggggagaagatagatttttcggcagagggacctgcagtgccttcatgcaaagaacatttgaatatccgagcattatctaacctggctgggagggttacagtgacgcttgactcagggaataactgctgactttgttcatcagaacccagctgtttatgggtagtcagcttagaaagtgggagggggacctttacatgttacctaatacactgctgtggaatttgaatttttatactgtgagcatcatttacttttatcgaaagaaacactaataatttatagcctcatgcaccatgttccagtgtcaggtcttttccttttagcaagcagagagataggaaaggtttgaagcggggcaattgcatgcttcaagttttgtgactgaagctttgtttcctatcccttcgctttaaaataggttgagtataagctttctgtatgcatctgtaacaaactaaacccggttcttctttgcctcaaaataaccctggattgattttatctttctcttggtccgtgatccttgatacaaacaaggttcccacggccccgttagccattccactctatccctggccactgtcctgtttccctggcatcccatcgcaagagacctgcttttactttcacattctgcacagcagggatttctgcaaaaactgaaaaattgcctatcaatccctggtcaaagtcaactatgtcatgttctgggactcaggaggacagcctgtgcttaccttcctgcactccactggtgcaccaagctgtcctgctcctctccttcagagcttttccatttgacttcaccttgttcccgagcagtgagagagacccagcagcctctgcagctgcctggaccactgggggaatgtaaatggagcaaccacataaacgaggagtgacaagcaccacgctgagctctctgcaaagctgcccagtgaccctaggagggaatgagaaataaattagccttggggtttgtgaggaaagcaggaggcccggaaaactcttcctctttctttccattgcttctcaaactgtaccttttgtgtccttctaaatccatctaccaggcctcaggagcccgcaggtgttcccccaggctaggctgtcttttccttgtccctaaaccccctgagttccttccctccctttccatcatgcctctgagttactgttctatggtgccctcctccaacctcctcttccaagaagccctctgtggtgaccagagcaaggtcagagacagaaccagatccatgcacatatgtgactttccacaggtcagaattttattgatgttatttcagccatgacctacatggagtttccaaggtggtaattattcttactatgtctcattcactgggtagtcagaggcgtgagcacacaggccctagctgacccacaagtcagtgaatgttgcaaactatatatagtaggatacttaatcattatataaatgttatagattaacatttccacatcaaacaaagtaacatttaacaaaaagagaaaagggggtaggaaaaaggggttaatgagccaatcccaggagagcgccttggacagagagagaatgctggcctgatccagacgatcttcaacgtcttgcacgggaagagactttgaggtgggcagagccttcggtggcagatgccaggcgctaaccgtgggtgacagtgggatggcgttcagtgaaatggttttgtggacggtgaagtcctgctcttcttagagtccttgtcctctctggtaagaggtgatgtaaagtgtgtgtctggttatgcccttgtcaggttgaggtagtttctgttgattaggtgaatgtctggtcctgttggtatgaagccttttgagatgtaagatggagttcttttctaagatggagtcacttacgtcaagagtgactatactatacaccctctcaaagagttcgcttttagttctctcctagtcccctcctagtccccgcaactccaacagacttggatcctgcacatcaatcttatctccctttttgaaaatccttgaaggggagccaggattgataaatctttggcatctctcaaacctcatagcacagtgctaggcagtaggtggctgattagccaatgcctaggaggcgtccgaataagattgcaagcttgttttcaatcataccaagaagagcaggaacttgcaaggagacagaggagctcaaactcatcatctaccacatactaattaggtgaccttaggcaagttcctgaatttcaatgagctgctgtttccagaactgtgaaatagggataataatacttctctgggaattttagtcactgttaaattagatatgcaaagcaagtaacacagggcttagattttacttggtagttaataaatcttagtttcttttccttctttaatcttagcaagaatttttccctttggccacaagcatgttttgcctccaccaccactctccccttgtgcatttttccaagtcgatcttatccaggaaaaaaacatcccccaggcagtacatccaggtgatgcctcaaggaatgagtcaagaaaggcataaaaattattatttttttaaaaagcctatctccctagaaaggaggggtgaagcctgatcatcttttttttatattcagagttctttcttctccccagagactcagagctatataaatgtaaagttataataattatgataacatttacattaaatgtgatgctgacaaggctttatgagatacaaaagtttgctgattcccactggaatggatagagcagagtctgccttccccatcctgacttctttctattccgatccagaaagactgcctgtggggagggtgagggagaaggtgtgagactgacaagtgttgctttatttatttatgtgatatctatcaaatgcacccattgcctccaggtctcttagtatatctaaatccagcagttagcacgtacatggaatgaaaagaaacaagcccacagcaaacttccactatgaaccaaatatttaaggtcagttaccaaatacctgggaattggggacactgagacagaaaggatagcaatgaggaaactacaataataaagaactttatagccagtgacaagattacactcaaacctgggggtcctgggaggcagaattcacagcttatacatccttattttatgtagggtgtttgtgcatatgccatcagtaaaagtaggaatgaatgaatgaatgaacgaactacagacagaaaagctcctcatctccaccatttactacactttttagttccccacaagcgatatcaagaaaacatagaaacagtttagaggccggctggggaagaaagctgtatctttttctggaatatcctcagatcccattctggagtttgacagcagaagcatggaggcatagaagctgaggccactattgggaagggaccttgtgtttatctgagatggtacctgtgagaacttgactcagcatattgcaataaattgagtcagcaaaaattatgtctagggtcacaccctatatagaagaaaccccaggcacaaaattttttttaatttttgaattaaatttttttaaaaattgtaattaaaattaaaaattttttagacagaaggagagaaagagtcaaagggttgtcaactgcctacaagatgtggggcactaaactaaatctttcatacatattatcccacaatgacaccatggagtaatgattatatctttaatttctctggaaaacatcaacaacaaaacaaaacgccctgtgctccaaggaagggaactagcccgcccaagccacaaggggctgtgctttctgggacccacagctctttgccccatgtgttcaggtgtcttcgatcctcagaaagggttttcagtcagagatagattcattgtattggaggttattcaaagctattacatgcagcctttaaaagatcttcattagtggagaggctggggaaaaaataaaatattcacatgaggaaattaaattctgccccaaagatgattaacatcctaacacttagttccatctttcaagtgacaaaccacgattcgaggtgatgtctctttcccgtgcccacgtgtgcatatctgtattatgctagtacagctaagggtgtggtgacttgcatttcacgtcctgcagggcggactcaggcacaaacactcagtgtttacattgctcaggggaggcatgaggctctgggatgagaatcgcatgagaatcatggcatgagaatcaaggatctgtactggcaaaagaagctggaataataacaggatgacaagaagaacaatagataacgacattaaatgtttactatgtgccaagcacagttctgaacaccttacgtgaaatgtgttaattaagcctcaaaaattgggaggattgcttgagcccaggagtttgagaccagctggccaacatagcaagaccccacctctacaaaaaatttaaaaattagctgagtgtggtggcatgcacctgtagtcctggtgacagggtttgagactgtgtcgctgcccaaatctcatgtcaaattggaatccccagtgttggaagtggggtctgctgaaaggtaattggatcatagaggtgaatttcccccttggtgctgttcttggcatagtgggtgcgttatcatgagatctgtttgtttcaaggtatgcagcacctccttctctctcttcctcctgctctggccatgcaagacctgccttcttccccttcgccttctgccatgattgttaattttctgaatcctccttggccatgcttcctgtacagcctgtggaaccatgagccaattaaccctttttttctttataaattacccagtttcaggtatttcttcatagcattgtgaaaacagactaatacacctagctattccagaggctgagatgagacgatcctttgagcccaggagcttgaagctgtaataagctaagatcatgccactgcattttagcctgggcaatagagcaataccctgtctatttaaaaaaataccctcaaaaaacagcccttaacagacactgttctgcctcttttctacacgaagttaccgagacttccaagtgttacgtagtttgttaatgctgttgccctgctggctgtggatgagcctagatgcagacccgctgactctccaccatttgcatttaattttttttaaatttaagttgtattttatgttattttatttgttttttgtagagaaatgatctcactatgttgcccaggctggacttgagctcctaggctcaagcaatccttttgcctctgcctctgcagtagcagggaccacaggtgtgacactggtcccagctcagcccttgcttttagtctgcactctactttgtaccatttcatggagaggagaaaatgggaggacccaaggtgacctttagagagcagagcaatcagcaatcactttagaaagaagataatagctcctaaaggaaaacttctcaggtagccaagagaacatggtgatcagttggaagtaagcaaaagaagaagaatggactttgagggtgaagggagcacatctagtgtggaaacactgggagaggttcctccaaaaaaaaaaaaaacgcacgattgcaatgaacctggtatctactatgatctccctcttggaattcaattctcagtgtacacagagactccaggaagccttgcagctgaaaacccaatttagcattggtaaaaccagtgtgtttcagacacatgaaatcatgaacccactggtccaccattttctctttatacctctgtgaacatccttgtgtatgttcaagcatcctttacccaggagactgccctgttgataaatcacttatccacacgggctttcttctgcccttgagaggatcgacacatgtttttgtggagaattcaggtgattgcagagaagcatgcaggcccaaagttatggccacaacagcaaaccctagtcctcaggtaacttagaaggcagccacatgatgaactatagcaaaaaattcctttttgaggtgaaactgtcacatcccacgtcaaggctaccacacactgggcatggcagaaaagaggcgcagacctctttggccatccaacacagttccacagttggtaaggtccctacaagcaccattagacaatgcagcagactgcagcaagcaaaagatctacatgtgcattttataaaagaggacccaaaaggccaagtcaccatcactaggtaacacagagaggcaagttaagaccacagtggaataaaaaggcacacccaccagaatgaggaaggaaagaaggaaaagagctggaagggagagagacagggtcaggaaagaagaggaaaagagagagagaggaagagagaacagaaaataaccctgccaacatcgagtgttgataacgacgtcatgtcatggtaagtatcacgcacggctggagatggtgtaaaagtgatgctgtcagtttggaaaacagtttgcctttatctaccaaaacttaagatatgcatgccatatggcccagaaattatactcctggttgaaagaaatgtgtgtacataggtacaaggggaccagggcaggaatgtttctggtaaccttgtttaaagcagcctcaagaggccactgcacctccagcctgggcgacagagcgagactccgtctcaaaaaaaaaaaaaaaaaataccctcaagaggccgagcgcggtggctcacaactgtaatcccagcactttgggaggctgaggcaggtgaatcatgaggtcaggagatcgagaccatcctggctaacatggtgaaacaccgtctctactaaaaaaaatacaaaaaattagccgggcatggtggcgggcgcctgtagtcccagcaacataggaggctgaggcaggagaatggtgtgaacccgggaggcggagcttgcagtgagccgagattgtgccactgcactccagcctgggcaacagagcaagactccgtctcaaaaaaaaaaaaaataatagcctcaaggtagaaacagtgccaatgtccatcatagaatgaagacagaggttgtggtgtattcattcaacggaacgtcaaacagcattgaaaattagtacattcaaactacgtatcacaaaaaagactcacacaatccaaaccaagctacagtggccagaaaaagaacacatattgcttgacattccataacaggcaaaattaaactcttatgttcaggaatggatgcttaggtggtaaaactttaaaaaggaaaaatcgagggcatggttataataaaagtgagcacaggagttatgctttgtaaggaaggggaatgtttgatggggaaggggcaggagaggccatgaggtcttctgggagctggcaatattctatttcttgtctgggtggtggttacaaggatcttcagtttacaataatccatcaagctgcacatctatattgtgtgcacttttgatgtagtgtatattctaccggtttttaaaaagacttaagcaacctggatgagaacacagaccaactgcactctccagagcacgagatgtgtgctggtcatgacttaccacgcagcttcacctgaggacccacagattcctggcctgcatgtctgttccttctcttgtgtttcctagtttaatgaatgacagcaccatcccattctagaaaccagggaggcattttgtctcttcctgctcccaggtgttctgtattccattagtttctaagcccagtttatttccacctcctacacattttggaaacttatcttcacccttcacgcccactaccaaaaccttagaactgtgtaatctttaacctatattacggcaacatttccccatgttttttggttgttattggtggtgtttctactctcccgtctatataattttatttgcttcactgttctcagagggaccctcccgaaatgcaaagcaagttatatcatagttgtaagatcatcatcatttccccatcacctgtaaagtcaagttcttacctctccatgtggcacacacggtcatctacaacccgttgcccatatatattttcactctcatttcccgtaaacgtgaccacttgatacctcaagccctcttaacctatgaacctgttattccctgggctgtcaatacctttgttcctcctctttgcctggtcaatcccactcatttatcaactgttcaaggaccagatcaaatgaatcttcctctacgaatgcttctcttccagcctttaaatcctgtaagagttgactcttccctccttaggtttgtttagttcttatgtactaacacaggttcatgctcttttgctataatgtgttgtcatttctatctccctttcgagatcatgtggctccttcatggctttgtcatagtgatgcccatagttcctaggacaatgcttggcccaaagtatgctcttgatgaaacttattgaacaagctgaatgaagactaaatgatttcagtgatgaacctgtgatggtttgaggcttaaggcataccctgaagaaagcaagctcctccaatatttagtggcatatcagctgatcaaaaatacagtatttaatcacatgagacttttggcaggaaaaattaagatcctcagggatgtaacaatttataaataagtattgctgcaaataatctttctttatatataaaggtcacctgcaaacacacacacacacacacacatctacaaaaaaaaaaaaaaactcatgggtacaaggaatgatagaatgctatttcttagcactctggtctactgcatcctcctgggttcttcattgctgttgactgccatctcagataattcacaggtgggacgcaaaggaatccctgaggttcaaattgtatattagcacaactttgaggtatatcaaaagtaattaggttgcaacaatgttttttgaaatcacctggatttttccatcccttcctttttggagaacctcagcctctgcttggatgcactttgctttgccttctgaagacatcatctcccagctctgctcctgagtgggggatggaggctattgatggcagggcacctgtcctagctgtctattttaattaaacttttcaagctgtctctgggtggccagataagcaaaacaaaagaccttaggtcttttaaaaaagctatacactttctaaatcaccattatgggccatgtgtggtggcttgtgccagtaatcccagtgctttgggagtatgaggtggaacaattacttgagctcaggaatttgaagctgcagtgagctatggtcgtgccactgcactccaggctgggcagtggagtgagacccagtctcaaaaacaaaaaccaaaaaacaaaaatcactagtatgtgttcaatacagtaaattccatacacatcctaaacataacataaatgcaaacgttgttctcaatctgtggcaagatatatttatactttgtgttatttggtttggttcctttttgtctggttcttaggaggaagacaggataacagagcagaattccattggacagggttgtcattgggtccttgtgattaaatctatattgagggcagtctttcaaaggtgaaaatcatggaaacccataagtagtttccgggtctcttcttggtgtgtattgtagaacagagccctccactgcaggagcatcaactaatggtcctgaattgcctacacattcccaaagtctgcagcctgtggcatacccaatgacaggtagatttggagtaagtaaaatatggagcagtctgggagcattttgttggctccttcttcgatttcatcagatggtcccagctcagttatcagctttgatttttagatggtgtctggggagaagaacatttctagctcttgctcaggcaggaatggcccagctcctgccttcccctttctttgccagcattgtcctctaggaggatgacaaccccgtggggcacagaaccgcttctctgataggatctcttccccagggcagctactcccctagggaactgactgagtagagacatcctaaatgccgaggagtgatggcaccatgaagcccccagatatgggccccatgggtggcaaacaaggaaatgttccagatgccaacggtgctgcccttgtttatgaccgagaggaagttaacccatctccaagggaacagagtcaatggaaagtttcttgcgtttgccagaaaatgatagtttcatatcttgtggatgaaagtttgtgttctgagagctgtcatggtggagacatgcccttggaaccgaagacagacagacagaagatttgaaaaaagagtgaaaatgaacacaagtgacaagattagaaaggaggatgcctctaatgtcaaattcttatccagtccccaagtcaccttcccctggcaagaattaggcccttataactggaagttacaactacctctccccttcccccaaacagagggaagcaggtagacagaatattgtcaagagtgtacatttagaagaacaatctcctctatacagattacatgaaaagcagagtattataacttaatgcttcaggttacacttttactggaaatgatatttaataattaataagtcagagtacccaagtttaaagcctggttctgctactttcaagttgtgaattcttagacaaattacttaaagtttctgtgcctcagtattctgctctgtaaaaagaccacataatagcacctaacacataggaattttttttttttttttttttttgaggtggagtctcactctgtcagccaggctagagtgcagtggtgtgatctcggctcattgaaaccttcgcctcccaggtttaagtgattcttctgcctcagcctcccaagtagctgggactacaggcatgcgccaccacacccagctaatttttgtatttttagtagagacgggttttcaccgtattggccaacctgatctcgaactcctgacctcgtgactcacctgcctcagcctcccaaagtgctgccattacaggcgtgagccaccgcacccagccttgggaatttttataattaagagaaaaaccatatctgaggaaattatgttgtgaatgttagctattattgttgcatactatctgggacagaaacctaatgataggtgtacacactgtcttggtgtctgtgcatgcgtgtgtgtttgtgtgtgtgtgtgtctgcaaaggggaatttcaggtgatttgtaactttttttctttttttaacagtgtgtcatgacagccagaggcaggcgattccagtattttaaagcaaacatagagatgaatattatctctccagttaagccaatggaagaagttgggcttaaagttgagtaactaaagtagggtaactaggttgctatgtatgtctcagtggccaggacatgctctgtaatcaatgagttgttttgtgagttgggtaagctggtcagaggaatgaaaaaacagaacatgattcagaaagcaatggccttcacctccacctgatcattgacgccccgaccctgtgaaagacacttgacattttgtacttcaagctcctcctgtaaaagtagagacgtggacaagagtccatttttaaagtgcagaggtggtttaaatcctttcctcatcatgactgagtgatactgccaagatctttcaacattaagtgcctattaagcgctctcctttctggaagtctaggttcctgggcctaaaactagtaataaacttatcttacttctaacctggaagacacatttttaaattaatatgactatgctgtatcaactctgtgatgtgccgcacagggatgtgtgggtctttgtgtttggctgcaggaggcactgttgttgatcctatggtgccttactcaattagatgcttcttggagcatttgaatgaggggctagcagggggtgtgggggtatggggtgggagtggagggtgagtagtggtctgtcatggctgtatctctgagaaaatgggcaatgtcagcttacaattggaatatcaaaagaactaagctccagagtcaatcatataactcactttgcagcatgcagctcagcttttgaggggtggtatctctgctgctgtctagaaattctgcatcaaggtaactgaaaagaaaaacagttacctaccaatgaaatgttgtcccctacagccttccattaacatgttctgtttagtactgacatacgaaaccaggaagcgccttaatgaacttgccgagccttttgtgctatgacattgctccctttgagcccagcctcttgagaaacagacaccattctgtgcaaggcggatgcttgaggttgatgtgggcctgtactgaagttgccttctttcctttggaagttcttctgcgtgcttccttgggagcagcacagagcccctgcagccctccctagtgctaacccctccagcctggacactctgcacagccctcctcatacctgacacactcattctgattagcttacgatacagagacctgggaatatccatacccatccagcagcccgtcatgattcagattgtcagggaattggaggacagacagggaggcctgttttctaatcctcagggttttatataatcctcctggttttatgatttctaatcctcctggttttatgattccaaagggttcaaccacctctgttctttttcttagagctacaagtctgtttggttctcaagtggttaggatttcctacctttttggtatacgcgcattctatattaaaacagctccaaggtgatcccctgagaagtttagactattctttgctaatggggttggcaatgtcctagtaacccaggcagtgtatgccttggcctaaatagtagggagctggaaagtcaaacaaatgttatcggaatagctacacataaggttcacgtctttgagaggatagtgtcagctggaggagaaggggtgccatcccctaccctcgctggatctctgcgagtggcttcatgacgactgaacaggacttgagcctgtaggagatggaagattgatttcaggtttcttatgtaccattctacagagtgtgactcacgctgatctcagaaaatgaaaaagaaagaaagaaagaaaacaaagctaagcaaattcagcaaaacttaataattagtgaatttcaataatagacatatgggtttattttaccatgtttctgtgatgcttgaatattttcttaataaaaaatcaaattcaatatcgaattgaaggattcattatggaagacccgcaaggaggttttaaaagaacaagcaggaggaagtttgcgtttgtttacttcccacggccagcgtgttttgcggctgacttggatttctcctggtgaggcagactccaggatcacacatttccagccatgtgcccaaggcctggtctaaaactcttctttttattctctttagtaaaacatatggctattccgaacagtatttattgtgttacacacaaaaaaacttatctacgactgctggtatttcaatcgagtgtttcttgacagttctctggtaaagtgattaaccagctgtctttttacttttaagaatatgctttgcttctccactccttttttcccattcacatccttcatatccatcaggaaaagctaggtatattcaccacacagtctcaaatttgttagataaaattcctgacccttaagaattttgtctttaaaatagaggcaaaacacataaaataatgtctcagtttcaaaggtcattatacctgagttctatatgagtcaaaatataggttaagacgctgtaatcaggcctctcccaaaacagtggcttaatcaaggtagaaatgtatttctctttcaaatagtggtctagggctagtggagcaaccttgacagccacagctttgactctagctccaaagtggctgcttcagcacttaccatcacacctatgacccaaacaacagggaggagtaagggaacatgagaggctcactttcgttccttcttaagacttggccttaaagtgtatacatcccttctgctgtcatcccattgcccacctaactgcaaaggtgggtgggaaatgcagtctctagcatggaaaacagggagagatattggtgaaagctagaactgtctgcctcaaccagctagtgacacatcaggactcaaattcgactgttttgactctgcaattggtgctatttaaaacaggaaacagcaagttaaaaaatgatttgttcacaaagacaaaggagcacaattgctgccccacgtgtcttcaggagattctgcaggtaaaagttttgaaccaatcctgtgaagtaactggcctttgcaactcacagacagaagtgactctccctattcagtcacactttttgcttggctttatctttcacggaaggctaggaggttttccagctttctacatggaagatcccgttcttcctcactttgagattgcagagatagctacctgaacgcagatccccgtagtcataaacgcagtcaaagaaattttgattcaaaaatacactatacaaggtcgtagccagaatatatgttccaacatgccatcaattctctagtaatcatatgctacttagaaaaaaatcaataccatgaggttggctgcagtataacacacaaggaagagaaccttttgtggaatttattttccattagattcttgtccagtgctctaaattccagaagtgattggcttcctacatgctttattcattctgctgactcctcccttcctcctttcttccagtcacatcttttgaatatgaaaaagccatattcaaagcttaatgtattcttcatgaaaaacctttaaggccatctcaataagcacaaccatttcttatttaataaacaatcgctctctcattaaatgtaaattagttctttatccttagctgtatttgttgaatctattacttactgtgtttaccaattttgtttcctttggctccagagctttctgtaaactactcataaatatgaagttgaaaggaaggccctttctctgtgtgtaagcacctgcacaagccactttgaacagccctcttcttcaagtcagctctgtctttcccatgcccccaggctgaccatcccggctacctacacatagggcagcaagattccgggtggcgtgcaagatcaccctggaccttcgtctctcagaaaagccagtgtccaccttcctagttctgtgttgcaaaagtcagaagtggctgcaggtgcaatctgaagggaacaagcgcagtcaggcttttaccgaggagaaatgggttatttcggtggcagcagcatttggcgcttccattcactgggccccaacatgtccaagtttcctggcttagaagggcacagtgtaaggcccatctgttccagcaggctttccctgattagataggatgcttggcaaacagaatcccagataatggatatttgaatatttttgtaatttccaggcttgtgcctaacagcttagcagttggccctatgtttaaagaaaatgggtaataatcatgactaatgtggcaatttccattcaaaaatttccaatggtgcttaattaaatcttccaataacatttggaaacaaaagttcccccatccattgtatccatgaagaagacagagtgaaaggatagtgggtggactcttgagacactcattgtggccaaacccaaccaaggcaaaaaactgtggccattcacttagttacagatcccagaggatcccctacaacccagccctttaaatggaactggtctattttcattccttcagtctccgctgggggacaggcaggaggtggagtgagagaacaatttgttagtatcccagatactctgttattcccaccgcagagacacaactactgcattgccccacactttcctttcctggcccgagaaagcctcattccttcggccttcatcatcatccttcttcttcacctccttttgtttcctttgcctcatctatgaaatcaggcaaacaggactcaccctttaccctctagggatgttggaagattgataacatgtcaagaaacagactggatttatttgaatttcacaatgtcctatttaaagagagaagaggcgactgaataaagaaatttggaagccactctctgtgattttatttttaagtcatttttctctctgttattactattttttattttttaggatttttttggtctggttctactgcaattcaaagtgttttataagggtcccaactggtgctgggaagcaggccacgcactgaagcagggcagagagaaggaggatgcagccagtcaggcctggggaccgacagccctgtcacgctgacttatgatggatgagggaaaagtctatttctcatccgcagtgggggaggtgaagtgtaaagaaagatgctcccagagtctctgggcgattcatcttgcagcagataaactctagaagctacagagttgtgaaggagagagaggaagaattgaagaatcaaattcattatgtgaagtataatctcatgaggaaatatcaaaatatgtcagcagcacccaagacgggaaggtggggagagggtggggaattcgctgatggtatttgtcagttgctaagccaggcgtggaggggagagttcctgggttccactgctctcctgcaaacagccttccccaccaaattcccaaggaggcccggcagagaccatggcatgtcatgatggatgaagccaggagatgcagccagcacacaggagacctctttgaaggcgctcttcccctgtctaaaattcactttcgctacttttccttcgtgtttcttaaatttagactctgcagaaggctaacatagaggttagatatgcataagtaatcccattaacagtggtacagggtgctttctttctggaacattttgtaattatgtctttcctaaccacttcctgtttgttcccaaattttagcagagctctacctggcgacaaacagcccgaaccttgcaaatgaaaataatttggggacccatttcctgcccctttaaccatgcttagtggactggaattctctgagtcctgcatatgcatgaggtctgcagacctgggccctccatggccccagggggagaagatgcagaaagcttctctgactctgggcatggggcaggctctgtcatttccatctctgtcccgcttctcattcccagagtgaccttgggcaaatcactttcacctccttgagactcagtttccacatctggaaagctgagataatagctacctgcctcctgggggaaactgcaaggcttaattaattaatgtttggcaaagcttcctagacctttgcttgaaagaatccatgcaagtgcaaattattattattatatcactggagccttagctccaattttgcttctgaggctaatgattatttcttttctgaaggaaaatattaattttaactccaagtaatttatcgggtagtgggaaaaaaaattaccatttgtcaaggacggcactctctaaatggaagttctagcagcccctctctggggaagactgcaagaaaaatcttcctattttaccatcatccctgggcatcttctctacaaggctcgtccctgctcccctttcttcactttcttcccaccgggtgatgggtgttagcctgggcgggccagggccagaccttagctgaacttgctttctatttctcctgtgacagctccagacactttttttttttttttttttttttggctcagcacagaaaccaaataccacatatttttaagaaacaatacttagtacaatacccttggattgatttcaaataactaggcaccctctctcttaaaagtttcaaactaatttactgtgtcaaatgaacccccttccctaagacaatggcctgtgctttttatggtgataaaaatagtgcaaggcattggtggtcattttctcctttttgattttctgtccatgaggcttaatgaatggcctggctctctatgctaggttcccaatggcccctagagcaaaccatctctaccgttccttcgctgtttttaaaacagcctgcaagtgcttatgtggctgcgttgccaaagagagacctgactctgctccccagaccttgtcctggtcctgcaacctgaggccaccaagaaagtaaaattagtctttgcttcactaggaacactgtaattgcttatcagcttcaactgcagaagcagacattttgtgcaaggctttctctgccagtggtttatgccccttgattcctgcaggttcttttggaattagtcagtatctactccattttactaagggaggaactgactaaccatgaggtccttttcactccctctttctttcatcctggtgcagatagtccctatgccaccctatttatttatgccaccttatttatttgtttgtttttaaacaaaggaaaattatttcccataattctggaggctggaagtctgagatcagagtgccaccatggtctggttttggtgaggactctcttcctggcttgcagacagccaccttcccactgtgtgctcacatagtagagggatagggtgggtagggggagagagagagggagggagagagagagagcaggctctttagtgtctcttctttttcaattttttttttatttttccagcttttttgaggtattgttgatatacaaaaatggcacataattattgtatacaacatggtgagtttggacatttgtgtatactcatgttatcatcactaccatcaaggtaacaaatatatccatcacctccaagagtttcttcatgtccattcattttacttcttttattttaaattttaatttcttatggcaagagcacgtaccatgagatctagccccttaacaattgtgactttaatattcattttcctctttgagccttcttcagacgttgctccctgcaagaatattcttacaacacacatgctcagacacatgctcacatgcacacacatacacacacatacacacacacacacctttcttctgtaagtgaagcccttcgcttcctctacgtctgcccatgtgtgcactgcccaggccgcaaagccctttcccttgctgtgtttctagtacctgtcacctacaccgccatgcggtatgggacaggacgacatactccttctttggtccttctcacatcgcagatgcttgcggtacctccccctgcatgagaagaacagcacttctgagggagctgcagacaccctggcgcgcatgttggtggtctgctcaccccaacactgtcccctgtgaacacagggagcagcccccttcctgcagctgacccttcaccgcctctccagggacctcctgcctctctgtccacctccagcctcaaccaaacaccagtagcttcctgaacactttgtttctcattgtctgtgcccttatccatgcttgtctctctgcctggcatggcatgaactcttctttctgtccagaaaaatccaaccaatattgttggcccaggtagagcgtctcctcgtgaggtttccaggtctcctcctgcctcgctgctgcctcccaggcggtgagagcggggttggttctgttctcatgccattgccacaccttgtacacagctcggttgctggcattctccatgctgggctgaacatctttgttgtcatggctccttccccttccagccgcagggcattgtgagagcagtgtctggactttgtatggtactcaataaatattggatgcataattgagtgagcaagtaagtgcctttatgttctccatttttagagcaaaaatttatcatacatttgagccattctgcagttgagctagaaagatgtctgagaaatctgcaaagggccctgagatcctgtggggactctgccccgtgacttctgaacaccctggacctggggcacctcactggagtcatctagagcccccatgtcctcagcacaaccatgtaactcagttgcccgtcttttgcctagcattctcaagggagaatcgtggtccttgtgcggacccatctacatagtcaggaagttctatttctgttctacctgaagtcctatcagccccaaactagaaaacactgggttttagaaaaggatgggtaacctgtgtgcacctcaagcctgaagtggttaggaatgaaaatgtgatgtcgatatgagatgatattattagaaacctgttaaatggactcctgacttgtgctcttaacgtctctcccttccagaaaactgccccacacccggtctcattttgtgcagtcaatataatcctgataagatctatcacggcgcttatggtgcgagaagaaattaaacatttaggggactcctccagcgccacactgattgagctcaaatgatgctgctaagttgacagatgcatttgtctgttcttgctcgccagtaagtctcccttgcagaatgtacaaattcctttacaaggatgtaaaaacaaatcaggaactcctttatgctgctttctccaggagggagtctccccgtacctgccactggtgcatgtgtgtgtgtgtgtctcgatgtgcgtgtgtgtgtgtgtgtgtctgtgtgtgtgtgcacgtgtgctagatgcaaggggcatgcagaaggagagccaaactgctgctcgactcatcatccacgcagtgtgagtctcgagccttccaaggctgaccctcttttccccgccattctgttaattgagccacccgtgccaactcctgaaatgcaaggacagtcttgtcagcaggggaaggcaccttgcacctcttagccaaatgcggcacaactttaaaccgattaataaaactcttaaaaggataatattgttgggcaaagtgctaaggtttcctgctttcgcttgggttgtatttttattaagctgtaagccttgttctgaaaaagagagagggggaagagggagtgagaaacagagacttttatagcctgcagcctcttgtttgcagattattttccaaagatgctcagtagaatatcaattgcctgtgattagaagtcctgcccggtactaccttgaacagaagaggctttagaagtgaaagcagttcctcagagaagccacacattttagtcttggaaaaatctctcagctggaatttgaccctcaaggtggtcagagctaggatgtgggggtggagcttagggggttgggtgtaagctggggagatgggcacgtttggaagctcccgttctatttcacctaaggaacatgtcttttcctcatcaccagagagaccctgtgggggactggggaagagaggggctgggagatgcttggtgggaaacctaaaaaaaccctagaggccgggcacagtggctcacgcatgtaattccagcacttagagaggtcaaggtggatcacttgaggtcagaagtttgagaccagcctggccaacatggtgaaaccccttctctactaaaaatacaaaaattagccgggcgtgatggcacacacccgtgatcccggctacttgggaggctgaggcagggcaatggcttgaacctgggaggcagagtttggcagtgaggcaagattgcaccactgcactccagcctgggcaatagagcaagaatctgtctgaaaaaaaagacccaaaaatctagagtctggccagagatacctgggaaagctctgacctggaaagcctaaaagacgtgtcctattggaagcattgctgctcagggcccatcctgttaactcttccagttcatgaggaatacaacttaccacaaacattaaaaaatcttctttccattttaataaatagtgataatttctaaatggaagtatgagcctgcatcagctcagttgtgtaaatgttaaagtcctgcgtctttcttccccaaattatttcacaaagatgctacttgaatccattccacttgcccatcaaaatgagaagatggcaccagtgaaggcagaacagatgggagagatggaacatcacctgggttcccagggacccaaattcttacagacatttgtagtgacagaggtgcaatcatagcacatggtatgtgcccagtaattacttgctgaataaataaattcataaacagtaatgatggcatccttattattactactagagcatagcaaacactactgaaaccgcatcatcagctgagagcacagtcctatgtgttttacatatagtaagtcacagaatcctctcgacagccgaaggaggaaaaatctctctgtttcagtggtaaggaaagtaagttcaatttgcctaaatcattattaattattcataaatgaactatcctccaatcataaacagtaaacaaaaaagatgtggcaaaagtggccagcatctctagggcattgaccacataccgggctcagtcctggactatacctcagtaaatcttcacagtcctcttgcaagacagtgaatattagatccattctacagagaaagaaactcactgacctgttaaccttcacttgatatggtattgtcatttcacaagtggggaagctaaggcttagaaaagctaagctctttgcccaaagtcacattgcaaatgccaggagttagattctagcctagaaaagaagagtgagaaattctcctagtctcatatgacgtcatagcaactgtccatctagagacctttgcatagttttgattggtcagatgtgaaaagagggtagtcttcccccaacacaggctgcacccacacttctcatgggagtctttcaacaccaccactgagacaatccaacatggtgggaagagatttcttctgcacatactgggcctagaatccacagcctaggtccactcacctctctgatggtttctcattccaccacggccagttgagtatggagcaccagcacgcattcaaagtcagccttgctaattagaatatgagggggccttagtaatgttggggaggattacaaatatatcagttcacattactgagcttggcccagctgtatacttaatagctcccagatgctctctctctctctttttcaacagctttatagagatacaattccagaacatatcattcacctgtttgaagtatccacacacttggcttttagtatatccatagaattttgcatccattactgcaatcaactttagaacattttcgttatccagaaagaaaccctgaattccttaggcatctactcctgaatcctaccgttgctccagtcctaggcaacccctaatctgctttctttttattgctgtttttgttttcgttttcatttttttttttttttgagacagagtttcgctctcgtcacccaggctggtgtgcaatggcacaatcttggctcactgcaacctctgactcccgggttcaagtgattcttctgcctcagcctcctgagtagctgagattacaggtgtccaccactatgcctggctaatttttgtatgttttagtagagacagggtttaaccatgttggccaggctggtctcgaactcctgacctcaggtgatccacttgccttggcctcccaaagtgctgggtttacaggcgtaagccactgtgcctggcccctaatctgctttctgtctttataaatttacctgtcctggacatttcatatgtcttttaatgacattttttattcctacttttacactcaggtttttctctatcttaacttttctttttttcttctctctttttttttttttttttctttgatacagggttttactctgttgcccaggctggactacagtagggtgatcacagctcactacattctcaaactcctgggctcaagcaatcttccctcctcagccacctgagagctgggactacaggtgcccaccactatgcctggctaacttttaaaaagttttttttgtagacactggtcttgctacattgctcaagctggtttcaaactcttggcctcaagtaattctcccaccacagcttcccaaagctctgggataataggcataggccaccacgtccggcctgtatctctgttttctaggcctaagaaagacctgggccttcttgactccagctgcatgctcacactttccagcctcagaaatgtcactttagaatgggctgaagttctgctctggcctgtggtccccactcagggaagctcctaggagcttgtctttttcttttaatttctgcattcttcccagatatcatttattctgtctatatcagtcttccttttcctctggtctttgctcttaagacttctaagtctgtgctcccataactgaaaactgcacagaatcactcgaagcttattgaaaaggcagattcttggacctcagcttcagaggccttcattcagttcatgggaatcagcattatttgtaaggcccccaggaagttctgaagtgggtggtcctttgatttcactttgtaaagctctaactgtcctctagtaatactcctcggccgcgttccaggaacattctccattccttggttctggctctgctctagaattgattcacaaatcctaaaattttctaaaacctagaagcaataaatgaaccttgaaagagatgcttttagaacaaattaaaaggagtgacttagtagatcacaaattggtagagtgtttacccgtaggaaacagtgcaggctataataataattcaaaaacaaggccaggcgcggtggctcacgcctgtaatcccagcactttgggagtctgacgtgggtggatcatgaagtcaagagatcgagagtatcctggccaacatggtgaaacctcgtctctaataaaaatacaaatattagccaggcgtggtggtgcgtgccagtagtcccagccacgcaggagcctgaggcacgagaatcacttgaacccaggaggcaggtgttgcagtgagccaagatggcgccactgcactccagcctggcaacagagggagactccgtctcaaaagtagataaataaatacaaaataataaaaattattcagtaaacagaattgcctattacatgctaggcactgcagactcagaaaggaacaagaatcatacacccctggctctccagagggaagagagtggcggagaagacagccatggaagagctgattaaggcagcatggcagtgcagagtggtagttaagagcaatggctttccagccagttgtgctgaatcccagttctgctgtgcggcctcgggcaagtcacttagctgctctgtgcctcaaattattgatttgaaatggggataatagtggctcctcatggcattgctgtgagaagtgcttcagacaaggaggtgctcaggaagtattaactattaggtaactaattaaccatgcttttttataaatgctggagttggggaggggaagtgcagttagtagcttggccggagctgctcacttggtctgaaagactctgatgaagtgacattgcagtggctccaagcgccgtacttgacgatttacatatattaacacgaatccccaaaatcctgtagagtaggtattatgcctgtgttaatctacccaggagaaaactgagctttccaggaagtttaagcatcttgcccaaggtcatagaactggaaatggcgccagctcccaggcaagctcttagcatgacaggccagcaaagatgcaattctgggaggaaagctccattattagttattgggggaaaccaaaacattttaaaataactgtgccctctcacaggctgcctcttggcaccacagtcaaagaagaatgctgagctggaaaaacgttgtgtttagggagacaattcttctgtccttctgtttatgttctttgttaaagagcacggtgtaaaaagacaaaagagatgtcggatttccttctctgaaacagatcccacagcacagaaggctgcagtctgaatcctgtactatttaattaaggcaatacaggacttgtcctttcagaactaggtcacaagtgtgcctcagcacagagactcctttttggtaatatgggctttgggaggaagagagcacatatgaaaaaaagtgaaatctgtcttccaagataccagctttctgtcttgggcagggtacagtgggctaggcgaacaatttgaaacaacaaccacagcaatctgagaccctggttgggccaatttaaaagaaatttgacccatgctcagacatttcataaactcccattgaaatgcacaaaaacatgcacatcaggtcaacccacggtgcttggctggtgggtcagtgtgtagccgggtgccctctcgcatgcagagaaggacataggcacacacagggcagcctttctctttcagaaaggatatcactggccacagtgcttcctagggaggccacggggtcagaccatcagaggtgccctgatgtacaaggggagcctggctaaaaggtacagtgatctgtgacaagattcccatcccagaacccaggatccttctgatacagagaacaatttaagatatttgccccctaaggacactcttaggcattattcttctccagaattaaaagaaccaaaactggaccatccgtgactcctgtcccaatcttcccatccaggctggatgttaccattttccccatccctgcttccttccctttgtcttcctttacctggctatgccttttgacctttggtgtgacaaatttcagctgccactaatgttcatgtagagcatgtttctctttcccttggatgactgtgcgcgcattgaaagactttgcagagacggctccctgaatagaaatgcatgccagacaaacaacgcgagcagctcagacatccccacagaggctctgggagcttaaaaagcccacgtcaccctagaaaagaggctattaaggtgtggcgtgatttgcactttcaggcagaagctttttaagctgctgcagagcccaatcacagggagatgaagacttcagtttctcaagatatgcaactcttctgctgatgaaggagaatgttcccgggtgcaggtggagtgagaacgggttcctggcacacattcagcaacctggtgaggagagctcggaccatgtcgccgtcacctcttgtctgtctgctccccatttccctgcagcctccagagccagcataaggggctggagaggaggctcaggaccatgtaaagatctcagtggagctgagcagaacaccactgactctgcactccctcctcttgacaaggccctggagaatccctaaacaagaagcagtagcagccgaagcccaggagcatgtgctggagagggtttgggagcaactggtaaagtctgacctgctgcccggagcccatgtcatcttctatcattcctaggaggaaaattagacccagaagcctggctttggaacagggaagactggggtttacattttggctctgcttatttgtcattgtgtccctaagccacagtttgctcatttgcaagatttctgtttttcaatactgtagaaaggaacagatgaaaagtcttgcataaagtgcctcacagtagaaaaccaacataaactagcctatgtgatattttcaaatggcaagaaaacgaagacagggactcccaaccagcaggggacaattcagttcaactgaaagtaacttcagttttctcccattgttgggtagaaacagaatttctactctctctcaaagtcttacccggtaggtgaccacctctcccaggcacatcccgctcctccaaggcctcgtcttctgaaacagttccccctcctatgattgccggggagaagctggaagaaaaagaaatagagattattttcgttaacaagtgccttctatccagatgacatttttctgctcccaaatctctcctgaattggagtcgtaccccgtactgtctctccatggaaagatcgggccctttctcttgaagagtgagaaactgaaggcaggctactcagtcatctctcgagttggtgaccaaaatgtgcctgtccccacatggatttcttctagggggctggagcactgtccacctgcgggcactggaatctccaggagtttcttcttttgctcaccagacacagccccatcacatgagccacagcagcctcatgctagcttaggggataaaggcctgcaggctcttttccttatttttaaagcaaattgctctattccctctcatggcttcagcacgtgggtgttggggaggagttcggctgtgcaggtgtgggagctagacgcccagtgtggtgtctggggagggttgatggacagcagctctaacgtgcttagagagtcaaggctggctcggcctttggaaatccaaataatctttaaatgccaactttatgcttcatagttatagtgaaccattcaggggtggctgcaattcaggaaatgatatcactgcactccccagtccagttagtgacccattagctaaaagctgccctgagtgtccacaagcccccattctcaaagccccctcaggtgccccactccctttaattctttcaacatctaggaaaaaggcgttgttcatactctattttacagaggcataaattgagacccagatggtggtgatgtgacttgtcccaggttatgcagtgtgtgaggggctttcagagtcccaggcctaaggtatccccactgggctacactgacacactcaagaaatgcaaactagagtgtgtgtatgtgcttgagtgtgtgtgtgtgtgtgtgtgtgtgtctacacatgcacctttacattcacttaggtagggatggctgggatcctgtccagtgatctacagtcaatgccagtcccagagttccttgggtgaagaagaaagagaagttaggagaacagtggaaggaagaggtgtggcctacaccttgtaaaggaagcaatattattcctcctgggaagtcacttgtctccccaggctttgaatggaaagcagcctcaaagtcccttggcatcgacgggggctgctccctccccactccccactgttacctctgggaagacctatgcctggtgctgaggggacctttggggctatttgaatagcagcaatcctcctgatttgcttctctccaaaaaaccccctacttggctgtggcctgagctctctcaggcttggaagagactttagacagcaagcacttcaatctatgtttagtgcaataatctcctattcagcaggaattctcaaaatttttctcagaaaaccagtccgtttggatgactctttaataaaatggggataaaggctccataattcgccagtttaggaaattgctggatacctaccctcctctgaaagagtcacagtgaacttcagcatacaaaggctctgagaagtcctgcaacaaggaaaccagtttaacattgttaaattatggtaagactaataggcttttatatagacacactttaaacatcttctgtgacagggagccccccgtcacattaaacctttcttccaaaagtacacttacagtatatgtctttgggcctatatattttaatttctcttctggttgaaatgtttctggagtataagaactacataccctattatttatatggcagtacacaacatatagagatgttcagtactgctctttccaataggacatctaaggaaaccgaagcataggaagtggcacagtctaactgaggagcatagttaatgaaattagggtgttttcttgttagatcgctataacttttagagttgagatgaccgaatgggaatctacctttctgcaattcccagcctgatctttctactttcactctatttccttctactgtttagctgaatatcttcaagaaagtagtttaatggtagggaagggagtggaaataataaaaataatggcttatccttccccaattcaaaaagacttcgaagtgcagatgatttttcacctgcagcgcttggatggcatttacctctaacgaactaacatactctccctggctcctggaagctcctgctctctccaggctcactgggtgctctgtggattccagatgaattatctcaagtggcaaatataccttaaaaggagcagaagtgcaatgcgtcttctaataccagggttaaaatttcattttattccttgtctgatgctattcaggactgttatcttccttcgtgctcaataggcaatagaaatatatatgtcggcagaaagccaggctcagacacggtatctagagaaggtgggctggaaaaagggagtcagtatgatttgtgctcccttccttcctctctgctcctaccaattagagaagggaaggacccagcccccagaccataaataacagctcgcccctgaagtaatatggctttgctcacattggctgcatattctataggtttgcatccttttcaactcttctccagcacagctgaacaaatacaagaggaaacagcaggatgtggatatttgagggctcttctttcaaaagaaccaggattggtccatctaaatgcacagaagataaagctcttcctagcatcctctttcctccttttctggttccccattccttacttcttagggtcacagccctgacctgccttcacccattgtcttatacttttgctcgattctccacccccaagattatcagagcttacctgtctttccgcttcttcctttcaatgttctctcaactagacacactggagaggctctagttcacaccaacccttcaacgactggcaaagactgcctccatgtaaacataagaaaatgcctaactcaaaagaaaaatataatctctaatggtagattcacataggagagctcatgagaatagtttccaagacccttccaagaatggccaaagggcatctgcctgcatcaaatttgataataagatgatccctgacgtaaataataacataatcattaatggcaaagtttctggagtctgactacctggattgaatcttggctctgtcagtttcttactgtgtgaccctgaggaacttcttaatttttttccacaaaatgtggtgcaataatatcaccaatgatatggttattgcaagattaaataagttaatctttgcaaatgtttagcactgtgcctagcccattgtaaatactcaaaaatattacctctcaatacatggatactaagataaagtcatgtggtatacaggcacatttcaaggactttggggtcaataaaacttgagtttgaattttggctcttctgattactggctgtgtgatcacagccaatttatttaacctccttttagcatcagtttcctcattggtaaacaggaataattgcatttccctcattaacactgttgtgaaggttgaagaaatcatgtatttgaacataccttgtagctagaaggcatcaataaatatttgaggatggggaaaacatcctctgagcagatagcttgaaaaaaatgacaaggattctttggggcatttagatgtgtgcatttcagtaatggacttacttagtcgctctgtcctgaggctatctatcaactcttatagcacttctgtgaggcacagagcaaatgtggataatggtgtcttgattttattaacaaagtgagtgtcccaagaaccagtcaatatagcacaatcaaatacaactccagacaggcagattgcttccttcctctaaagcagtagttttcaaattgtattttgcatttcactttttcaagaaggatctaaaataggacattattataatatataaaatagtaacatttcttggaacgaaagtggctagagttgtgcctgctctgtttctccttcatatcccgcggtggtgtctgcagtacctctaaggaaatctaagtctctgcaggatgcagcttcaaaaccaatgctctaaagccatggaattttcttcagactcttacagtgtgcagtatggattaatagtgatttcctactgtcttagatttattaagattaagtcatgtcagacaaacctcatttcctactttgacagtattctccagggaaatgtagtgaattggtatttcaggaaggcattttacaaagccttttgtaatagctttattgcaatgacaaagaagtttacactgaataccagtaaaattaagtgtattagtaagtagatgaacaactatagctaacaggtactgaacaactaactgatcaatgtcaagcggcaggctgctaggacacctaggacactggctgtgtcctgtatcattaaatatctccatcagcaagttggatgaagacatagagatgacacttatcaaatttgtgcatgacatgaaattgggaggaaaagcaaatttatcaggtgatcgaatccagaaagatcttgtcaggctgacagaatgggccatatctaagataatggaatttcacagggaaaaaatgcaatattttataattaggtcccccaagcaaattattcaaatataggtttatgtcatatctgatgtcagattcagttatgatctatctaacggcaggaagtagaggctctttgaaagagtctttcaggtagatttgagcagtagataatgggatagagaaaaaaggccagtgcatttagggacaaggtggataccacaggggagagctgcagggaagtggggtgggtcagagtgggtaagtattccagtgagaacagagacaggggagctacatacataaaataactctttcattcattctttctgaatatattcatcatgaggccagagagtatggcttttaagggcataggctctagactcaaactatatgaaattcaaaattggctttgttacttcccagctgtgaacccttatgcaagttacttaacttctctgtgtctcaatatctgcatctatggactatatttgtaactatctccctcatagggtgatggtgaggatccagttcccttatgcttatgtagtatttattattttgacagtttttcactaagtacacagcctgattgaggaggaggaatgagatacattacttcttgtgaagaaaggctgataaggttcaagcagagtatcccatgcaggaggttcacaaggcctggaagcttagcaagatagtcacaggaaaaagacagaaagccaggaatcagaactgcataacatggaggaaaccggacttggggactaaaatagaatttaggcaatcaaaagaaatgcaaggtctgagtccagctaacaattgatggggagcttgaggtgttgggctgctgttctttaaatctcttgtgtttgagatcaggattgattacagaggcaaaatcagggtggagactgctgtagggtcacatggaccctgctctgaggagcaatgggaaacagaggctggaaactaggaagagcctcacagattggagaagcagagcttagtcatagcagggcagcaaaagaagacagagagaaaacaaaacaaagcaaaacaaaaacagaaatataaactatctgttttgctgattgtaagtttcccacaagttacaagagtgaggttccctctcccttttatagtatataaaacaaaatattcaagagttctgcattactgtaaaccagtcaggcagtcccctagagtactgtctaatcattgcatcccatttttaaaaggtttgagaggccccacgtcggcctggaggataatattacaggaccccataatatgtgagcaaacaaaatagagcttttaatgtccctgtgggggaaccaaagccacgtccatgcatgggaggaagacctcttacagtatttgcaaggctatcttctgaaggaagagtggttgatccttgctcattttgctgccaaggaccagagaatggaagctccaggaagagaacttttacatccaaagtcaatgcaagggcagagatgcagggcttcacctggggaagggcatacctcccacggctgggaaaatgtgctcaggagtattccagcattgcttgaatgggttagatggaaatgttgaaaacctttccccaacatggcattctatatttctataaaaactactatgagacagttgagtgagccccatgattttggcatgcatcaatgccatatttagaatggctgccctgagcaacatttttctctgccatcttcgcagtcattcctgggaagcaagctgtagttctctgccgagccaggaggtggagatggcctataatgtacccagagagcctgcagggagggctgcgtgatgaggttgagcagtggggctatctgtgtggattggcagccataaaggaatccgagagctcatcggccgccatctgtcttcattttgctaaccccctctattggatgccacaagcagctcacttcctatatttataaacatccccaatcagtcatttctctgcccactgtcacatatttgtggcattaatgctggctgctttatcacagattggacttcatttcaggcataactctcatatactgtggttctgagatctttatagccacattacggtatatggctgagttgtgattacacatcagtactgtgaggccactgacagcgatttggccctctcccaccacctgccacacctgccctctgagggcagctatagatcatgctagagacacaggaaaatgggatctgtgagggagagagagagagaacaaaggttaaggcacacactctccaggatttagggtaggccagggctattccgtagggctgagaacccacagaactgtctcctattggcaaagtgacctgacagatggagagagctaatgggaggggatgggagttgagaaggagtagtctataattgaactgacctttctggttgcccctgatctcaaagccgacagtgggtggtagacttccttttctgatgtctgaaatcaggaatgtaagttagcatttcttcgtattcccttgcatcatgcttgtcccattcataagattgctctccttgtagagatgaaaaaagaatcttttttagtcccactgtgtttgggttcttgtagctgtcatgcacggatcccaggaaccacagtcgcaggggaagtcgcaaaagttctctctcatggaagtcacagtggccaccaaaaggtcaaaagtaagagctatgcttggtcagtagacaacaaaagagcttggaggcaggaagcaataaaattttagggaattatgaggccctgggttattgctaaaagggtgtggggtatggggtttgccacactcatcttcagagagagtattttttttattctggaataaaacaactttttcaagtcttcttggtcatggcttctccttacaactcagagagacagaagagctcttttccccttggtgggcggagcccactgctcttgcgggttgctggcagtcttcctggctcctgactagccttccacctctattttcctcttgctctccaaatgtgtagatactgttcttttcctcggtccccagggaggcatggaccacaagatattactgaagattgagcggtaacagaggagagttgcttcaaggagagggaggaagtctaacagagtcagatgacgaaattacaacgaatttagttgaaagctccatttggattttacttttgattttaggatcggtaaaataaaatgagtgttcctatgagctgagggtgttggctttataggcaaaaaagggctgaggaaagcagaaacagagaacaaaaagcaaattggcctttttaaggggtactttatagagttcagacaaggggacttcctcgttattctgactctggctgaccagaattgcctgctttttggaaaactggtccatttcaaagtttggtttgattactgaacacttaacacaagtgactccgttctggttttggtctgttctgcctgggcccagggcaggagactgatcccctaaaatggcctcccatgcactttgtttaataagagatttccgacttcacttatgaaacccagcacttgcagcctttccctgacatccacactctgctggtgccctgattcttccaattccagggcccgagactgcccctcactctcccccctcttctcaagggaaacaaactggctttcctaatagttctaatttcccagagagggtgccctgctcacagaggaacaggctttgccatgactatgcagagctttttcatcctgatgatctcaaaatccccttctagaggggctctcagccttcactctgcagatcaagaagcccaccagtcctcacccacccgactcccaccttccctgcccctgggagccagctttacccagacgagttctgctcccagcctctaaaatgcagaacgggctgctgctttcaaagctatacttcgatggagtttcctatactagtgaaatctgttttaaatgaacatcaagaatagccttgaaagggaaaatatggactcgaatctacgccgactggcaccaagcggcatgtgagaaacgtgaggaaaaaaagtccagctcttcctgctcgtcagctgggccctcccccttccagaaagctaactgtatgtaaatgaatcccttcatctttttttagacccatagcagttgccgcgcttccaaatttaagtaatatatgctaaagttaacttagtagttaaactatgctttggagttaaactgcctgcattttaaatccaagacttaccacttattagtttttatgtttgttttgctttgttaattttttttaactctagatgagtctccatgttcttgcttaaaaaaaaaaaatattatttactcctgcatcggcaagaggagaaatcaatggatgccttcaaaacactcaggacaatttgtggtgcatagttaacacgcaatacttaacaaagttaatgctcaataattgtcaatgtcacattccccacgtccattacttttctgttagacaaacaacaacccccacgcccccttcccccaccaaaaaaacccagccccttctgagatttactggcgtttggggtaatgccatcgcagcagagctgggcactgtgagtcccacggaatcccgctctgtctgccatccctctctatccagcctgtggcttcatggcctgtactttcttttaactgaggttttcaggaaatcaaatagaagggatttctgtaggacgatggctccgaatgctgcttggatcttctagatgttcctcttttcacacacgggtagcgtctccctggctctctttgatgatccaaatgcatcactaacctatttccacagtgctggggacactgtaccaggaagctgcctctgagtcctcagtaccaacagagcagattatgttccatgttcttccaattggattcaggtccctaagctgaataccagcctgctggccctagagagtagagaagcctctctgcaccttgaatttttcactcatttcagagaaatccgtagcctcatagcagtaccttccccatccacctccccaatatactgcacacatttcattatctagttctttagctcttgtggcaaatagatattaaaatattaaatctgtctaagatatcttcttcataaaatattaagagaaaatgtctgtgttaacaatgttttaacatgaaatcataaacaaactgctgtaattgggtatttttcttctgaaggtcatatgcctccagaaaaatcaccctggcaagtgtgcaattcagaagagtaatcgcgccttaccttcagacactgtgcttttttgtgttcaaagagcattctttaaacattaattagttattccaccaaatatcctaggaggtgcggattaatatctgctaaacacagatggtgactcaaagggagagggaggctgaatcctgcctcacatcacacaacgaattggaggcaggactctttagtttaatccctgcgaatggactagcaataaatcacaaactggggccaaggaaccaaggagtatttattctaaatttcttatggatttcttctattcttggatttgtatgaaacccatagatgaacccctgagaagtaccttcatggatatgagtccactatcaatggaccccttaaatcagatagtcactgtcccaaggatctgcagctaggcactgttagaatgaagctctctcctcctgtctaacaagatgggaactgcttgcttttgagtccattttagctacaagtgatgttttatgaatgctgaacagtagaaaaaagagacgtgctggcatcttcctgggatcccaatacactaggactactacaggcaaaaagctcagaggttaactggctgacaaccctctttgctgacaccagccatgagtgagtgtctctcagtccctgccctgtgcttttcctaaggacttacgacgtccccatcgcataaaaccacttgcaaccattcccaataattgcagtgtgaaaagtgagctgatcagcatccgacttttatggccggctactaacccagccagcattttctaataatactttgcctttatatcccaggatcgcagagcaatttacgaagattaattagaagcgcctcagaactctccttcttggtggaggcaggggcggaggccatgagaggggagttaaatgagcctccctggagtgtgggaagtgagaattttaagtgagggctcctctggttcaagccgggactatatgtgagaataaaacgctgggtcccattagtagtcaacagagaaacaatctgtcatctgatattccaaaaggattcaattgggaggaagtaacgagcgtgtatttgtttattttttatttgaaaaatgatgtaaatacccaaatttgttactacccctggggtttcggcaagatgcccaagatatctgcaattttgtgagattacagcctgtgtcaatcaccctggacggagccatttcactctttgcccttcagtgcccacagcctgcagtctctggttcgccgagaggccgagggcgagctgggatccatgtgaccctttgatgtctgatgggacggaggctggccctctccgggcctccccctctcagtgctgcatcgggcctggtgctgccaggatccgcttggcaaagaatagggaacgatggtggagaaaggactctatcaggccattgaagaagcgcagctgctgagaggccaaggggggtgcagtgggggggaagctgcagtgacgttctgttttgttcttgcaaccaaggcacaaattaaggcaaaattagagactttctttgggctattggacggatgggaggaggaggaagacggggaagcagagcttttaaggacagcaatttgagaacatctgagacaaatctgtggctgattctttttttgtgtgaattagttagtgactttctttttggattccggaggggtttttccccccttcctttccctttttgcaccatgcacatgtaaatgtgattgagaattctttcgtcagatctgctgccttggcagccttcctgccagctggcctggctgggggaacccacgctggcggctgattgcgattgacaagtccgggtttggtgggaggaagttcaccatgggagacactcctcaggccctcctttggggcttggttcctgcaggaaaggagggtagaggggaccccccagcaggactgaactcctcctctctgcccgcagagggcgcccaagccaacaccaccatgttgtgtgaccacctagcaagcacagttgtgagtgcagacggtggctactctcgccggggcaccatctgatgcagaatcactgatgcccagagtcgagtagagtttgaaaggccatggagtttacatcctccttctctatctcatttcatgcctctatgtagggcatttcatcaaaacaccgagatagaagtaagtgtaaaaatcttgcctgccccaaatggttgtagtgtgtggtttgtcctattttttgcttctctgtttcagctcattttctctttgtgtcctttcctttttcccactgtggctccaggccatgttgatttgctagtgtttttccttaccatctttcctttcttctccctgcccacgcagattctcaccaatttgccagaacctaactcaaggcttccatccccacaagttctctctgctaactaaatgggattgtgtttacaactgttgagcacagaaacttacctgtcgtaactggtctctaaaagttcagtgaaattacacactgtcataggtaatctcgtgtgtgtgtatgagtgtgttagccttttaaaacaatattttagtttttcctttttttttggatacaggttctctctctgtcacccaggctagagtgcagtggtgcaatcacagttcattgaagcctcaacctcccaggctcaagcaatcctcccatctcagcctcccaagtagctgggaccacaggcatgcagagacaaagtcttactatgtagcctcatgtgatcctctcctccttgagtatgggttatgcttattctattattcttacaaatagaatacagccgtagtgatgggatgccacttccacaattaagttacaaaaagcccatggatttcctcttgggcaagctctctcactccctctgggattactcacccagggagccagctgccatgttgtgaggaagccctgtgcagagacccctaacctgttaatggtcatatgagtgagcttgaggcagatctgctcctcctcctaggcaagactttagatgagaccacagctctggcccacagactgactgtaaccttaggaggaaccctgagccagaggtacccagcaaagctctttccagatttttgaccccagaaactgtgagataataacagtttgttgttttaggctgctttgtttgttacacagcaacagataattaatacaatgggttttctataagactcttttctcctcttaaggtgctttaaagaaaaagacggtaggttttcaaaaagaaaatggacaagcttcagcatgaagagactgctttttaagtgttttcaactctttggaaagaacaatctatatcacttatctcacactaaccgtttctgaacctagagcaacttcagctattgaaagaggtatcaggcaatctactatatcaaattaattttagttaacttaaaaaataagtgatgctcaattgggaggctacggagcaagcagaagtactcagaaaagagaaggacactaaccagtactaactacacccagtcattactccacgtgacttgcattgtattatctcattttatttacccattcatgctctggagtgagttctgttattatctccattttacagataaggtagctaaggcacagaaagtttaattacatttcccaatgttgtatagctttgataggctgaggtgggcagatcacgaggtcaggagatcgagaccatcctggataacgtggtgaaaccccatctctactgaaaatacaaaacattagccaggcatggtggcaggtgcctatagtcctagctactcgggaggctgaggcaggagaatggcatgaacccaggaggtggagcttgcagtgagcagagatcgcaccactgcactctagcctgggagacggagcgagactctgtccaaaaaaaaaaaaataggccttacttcgaagtccatactcttgaccacaaattattctgccttaccatttcagacaaattcaaattattaaatacaatcccattttagaactcacaaatattggctaattgaaaaattgatgaataatatagatgtagaatgaaattgatactatattatatattttttaattttatcctatataggcaaagcttatttcaccagtcataacacacacctgcatgagtggaattgtatcttaaatgctccactgcacccagtccaggactctattctttcatgactgtgcatcagaaacaactggaggaagtaagtaagacaggggccagcacagagagaattacagtagttgacagcatgaaagaagaggtggtcagagatcaaaacaagttcagggctggtggaatacaaagtgagagagagaaaaaccaaatcatcatctttaggatgaggctgatgaggaagagtgacccatagctgagcatcaagtaagccaaggtcacagaaagacaactagtaataaagcatgtgtggaatgcttgctatgtgccaggcactgttctaaatgattgtcatgtattgtctcctttaattttacatcaccatatgaggtggttactaaaagcgtccccatttcacagatgaagaaaccgaggcacagattattgttaactcccagccacaattagcaaataaaagggttaagacacaatgagagatctgctgcaagctcactcaaatgactgttggcaggttttggtcccttgccaagcaggcgtctgcacagggcttcctcacaacatggcagctggccacccccagtgagcaacccaagagacagtgagagcttgccccagagcaaagccacaggctttgtataacttaattttgaaagtgacatcacattatttccaagatggcctgaaacaaaaatcctttctcttgaccactactgtaaattttcttggcaatgtagtttaagtcagtactagtgtgccatggttatgaagcaaatttgaattaaggaatggggatatttaccttttgctatattttatagatgctggatctgggtagggcaaggacacaaaaaccagtgatagccagagggatttgccatcttggtaacttgagtctacctagaaccaaaacagacaatcaaaagaaaaagcctggaataattatttagtcctgctataattttactgaacatcatcaaatttttaacacttgtaatcaacctactatggggaatggcatcaggctagttgggtatagaaaactacgtcagacaaggtctccatctgcttatgaagacattacatgtaaatattaactctgggcaatgtgtacttattgttaaatggggtaaagacattaactgcttgatgattctgagagaactcactgtgagctcatgtgctgtgatttgggttttgaacaagagaaagaaagagaaatggcattaacaggtgtggctcatgcaatgtgaaagtggagggtttatatgggagagtagtggagcctcacgctgcagaggactcatgcctgagcatgctaggggagaggttggtcttcgtcctgtaggttgtgggtggacactaaggtttgtgagaagacaggtggcatgataaattagtatttaagtgagattaacacagcagttatacaggaaaccatgccactcttaacctggaaaaatgtgtgtgtgtgtgtgtgtgtgtgtgtgtgtgtgtaggctctggttgtagtgggaaggcacgaggctagaagtcagaagacccagtttcttgtaaatatcttaccattaataatacacatgaatttaagcagggcttttttctcttccctgggacacacattcttcattataaagtgatgggattggagactctcctaaagtcctcccagcactagcattctggatttttcacactgccatccccctcaattagtgctgtaattaaaagctgactacacatccattctccatccagaaactgcagtccagggcttcccacaggagcttctgcagaggcaaaacaaccctgtcctcttctttcttacacatgatgatgaaaccaaagtgtttttctcccctctggcttatttaaccccaaatcattatttgtttttttgtatcttatgcctttcatgtcctaggtttgaaggtgatgtgtacatggcagagagacaccatcccaccccttcctcgtcacttttgttgaaaaatgttcctgcatccacacatacacacatgcgcacacacatgtgacaccaggtcactgcctggcctcactgctgaggagatgaaagcaaagtttccagggcacttattgtgcctcacctggtgtcccttagctggaggtgtgaggcttatatcaggtaatacagagtggagggctcgatccccatataagtagtacatttcagaaagtagcaaagaatatttcttctgcgctaaaacccaacaaagcagcaagggatacgctcttccccagccacatgccaggatcctcctaaatgcagatattcaccaaggaactggaacgttctcactccaaggctggaaaaatgactcccaggataatctgtggatgtaatttgtctttcagtctattttgatcaatctcttccctgcacccagccctcgaccttgctgctactgggaggctcattctcatggagacagggagaacctctgtcccctccccagtcaaaagtcatctgtgtcctttctgttttttagaaccaggactgtctgacagcagtgatgaccctgggggcttgtgtcatcattcaattcccatggtgggggagcaggtgggagcagagatacctgaagcacccagaagtgagtgggtttgcccaagagctgagtgttcattagactgaaaacagcaaacaggttgataccagaggagaagaaccaagcgacatgctggaagcccaaagtaacagcctcagagtttaagaacaggggcagaaaacagtgcaaagcagatcccagagatagggccagaggaagtgcactggactggtctctggtgtccaagcaaagtgccaagccaggtgtcccctgcacgacaagaggacaattggatggcttcttaatgtcccaatatcaggccactggcagcatttacaagttattataacaacaacattccttctttgaatgcttgctcacggccagacactgtgtaagggctttagaatactattaaaactcatctgcatggcaattgatgtgaaggctcttttctccatcttgtaggtgaggtaacgggcttcctaagagaacttatgggacttgtccaagctgtactgtataaatggccgatgtaaggtttaacccaggtctggccccaaatccaatgctcttaattactgaactttgctgtccccacacaactccaaagggatagcatgcgagtggatacccagtcatcatttgggcagtgctcagtggccctgaagtgaggtgggctggagacaggactgcactcccaggagaagggctccgggtaacctgaggtgacaggagcagcaagcaggctggatgaaccaaatgaaatccttgggcgtagtttcagtgcatccattctgggagagtcagcagcactgattcagccagagcttcaacttcttagggaaatttcttgccagctcagctgttaagactcaaattcctcacctcctcccagcccccaccgcagggttctctgctcgctgctctcatcttccccatgtcactcactcatcgcagaaccagaaggctcagccagcactgaaaggtccctggggaaaggggggccctcctggggggcccagatctgtaacaaatgacttcccgcagagacaagctgtgctgtgctcagaggccctgctggggagggacgaagcctcccgtgggcctgcttggtctatctgctgctgacagtccatggagctgagctgggggagatggaaggggggcacaccctggctccccactgggtttaggacccagcctgctgagattcgtcccatctgacaaccctgcacggagatgcatggattccctgcctaacaagactatctactggtgagctgagctgggtagttcccagctcaaatgagccaaggcttgagatttgctccccgaaagggtcactgataaagaaaaccccaactctgttgccttcagtgtgtctttcaccaggtagataggttctgtcagtcacatggaggaagcttgagagtgtggatggctcagccctgctcatcacagccactgggaaaatacccagagcgctaatgtgcccagcagcaggcaccagcatgaatgggaagggggcagttcattcacagctgaaatgcacttccctgtgtctaacctgaattcctcctgctgcaaggtaaacctcccttcgtttctgattttattagagaaacagttcttgtgttatgctctgggtaagaactactcagttgttggaagcccatcccacagcctcacctgctggaaatcagtcacctcttcttttcctccctttatacaaatagagcacttttgcccctggttggataatgatgttcctcataacaggttaagtcaatggttaagtcagtgatgaggggtaggaaactatttttattgggcatccactacgcactcaccccacttaatcctatttaacttagtatttgtcaaaggatcagaggaacagctctgactatgggaggcagaattactgggctctgctaaaaaatgtggtagagcatgctgggccttcaggcctagactggagtcctcacactgctactaactgagaagctttgagcatgtaacttcacctctctgagactcaatgtcctcgtctgcaaaatggctttgagcagcagctatagccttttaacctaagatccacgaagtctagcccagggcctggaaatcacacatgctcagtaatgacttgtttagtaaacagggcagtgcttgaatgattctggtacagatcattcaaataacatatttaaaatgccttacaaagcttggcatataataggtctttcaaaaaaaaaaaaaaaaagctagtttcttttgtcctgcagtagtgatgaaagccaaacaaccacgacctgaaatttcctctctcctattcacctccccaacacaaatacacacacacaccccaaacacacacacacacacacacacacacacacacacacacaccatagttcaaagttgacctttaggggctgtttcctcctccttccccaccactgcttgctccctctctctacctggtctccttgccagccctggcctgccacactccccaagctgcagtcccccaggtcccctctccctggcccctgcctccccacaatgctgggctcagagcagatgtgcagcagcctgccatcatctctgatgctgcccttccctgccaatctccggccacgtctggcagctggaattgcagttctccttgtttacaatgcattgtaattgcagacacaggctatgctgtcatttgtaattttctcttgtcctgttctccctgcacactcccttgcctaagtgtcaagcagttgcccttgtgagtggtactattggcaggaaatgtgctccaacatgcagcaaaaagcaaactattatttatttctcattctctccctctccactcaatagatgaaataggcaaagagcagtcctgtccctcctgcagcccccacccatccctacacctctccttccccagtgccattagttcctctaattgctaggtctcctctttcagtttggattttgcttcaggatgtctggagattacagggagaattgccttccctgctacagttgtctttcaacaagtgagggagcaattgcctggcttagctctcagcaggtggggtacgagcatcttctggagacaggctgctggctgggacttcccaacccatcgtgtcaggcaggggactgagcctcaccagggtccatgggctcaaggcaactctgcctgtggatctcaaacaagccaagtgtaaaggctcccctgccccgcccccctgccatagcatgcactgttctaagtggatgacacgttaccccatttattccccattagagctttgtaaaagccgttatcacctctgcttcatagatgagaaaactgaacccaagtacctagtcaaaggtcattcagctgatagtacgtgggcaaagctgagatttaaaattcactcaatctagttctaaaacctcttgtattttgttgtattttcttttgcgccacattctgtggcctcacgaggatcatgtttgtctgtgtctctggacatatcagtttctgcacttggcaggttgctttatgattatctgtttgtctgtcttctgtctgctactagactgtaagcactctgaaagcaaggcctgtatttcattttatttcccccttgtggtgcctgcatggtgcccagtggatcttttacatggatttgttaggatgaatgcattcagaggcaatatttggtcaggttgctgcccagagattgctaaattctgtgcaccagccttatatagtcttgtttctgaggaacatggatgattgtttgcctctaaatgcataaggatggttgttctagacaaagttagaagtcaggaaaactcagtatgtatctcatgacaattggattcaaggaaagtaatacacactaataggtctaattcatttgtcatttgtaataatttggcactggggaggacctgggaaagaatttatgctaagtcctgtagattttttgaaatccaatacaactgtcctgtaccaagaactgagtgcttgcattagttgagtatattaggagttggttctctttagctcctttcccccaaaatcttatgtaacattctcatattacatttataacaaaaggaaagtttaccaattttttttaagacagggtcttgctctgtcacccaggctggaatgcagtggtgagatttcagctcactgcaacctccgcctcccaagctcaagtgattctcccacctcagcctcccaagtagctgtgactacagtgcagaccaccgcgcccagctaaattaaaaaaaaaaaaattcttgagatggggtcttactatattgcccaggctgttctccaactacggggctcaagccgtcctcttacctcagcctcccagagtgctgggatttataggcatgagccaccatgcctgaaagtttactaatttaatattggtaacaattctccttctgatgaaaatattgcaacatcttgcagggaggtagaaggaaggaaatgagctctggcttgttcacctgcattgagacctagagaagttgacagggaggacaggagagtagggcgccatgtactctaaatattgcagtaatttctcctctcttcctcacatccctactcagccactcagtagccatgtgtctttaagccacttgctcaatctctctgggctctgttctcttacttataaaactggtctaaagatccatctgcttcataatattttgttggcttaagtcatataatgtatgcagaatgcttagcccagtgtctaatgcacctgcgtctttaattaagggggaattccacatcatagctgttttgccatttggggaggaaaggcagtgacttgaaggaggtgggatggctgtagctgagtctcagcatggggcttgctgctctgtctagggctcatccagccacagcaaaatcctaggcgtggtccaccagtgaatcacctgctggtgtctctaccctccctccacatcaccatgcgcctccaccagctgaaggcaacagaaagctttgatgagatccaattaggaataaagactgtacattcaagagggctgagcagttcacacggaggggaaaaaagaccctgaaattactgcaagtgctcagcttatgtgtcctcacaagctaaatagtgaagaaagatgtgtcatttagaaggactgactcctggtggaggtttgcctctcatcagctgagaaactattattttgcaaatgacatctccatcccaagcaattgtgtttcccccttattctaaaacacacataaataaatgatatttagagagctgctgactgtggagaaggcttgcctgagatgaaagaaaggaagcttgtatttgccggaacggactcttcacaaacctctgggatgggctgtgtacagatgaaggttttgggctgacagtgaaggcatatcaagcttctgtgcctcctattgggaactactgaggactttggaaaattagagggatttgcaggaaggcaagagtagcccaggaagacctcaaaagcaaaccttaaatacttcagagcagattcagggacagctagacagagaatggtttacttctgttgaacaaaaagcagtagaaagaagccaggggttcttgtcaacaggacataaaatacgggagcccatgcctggattgattgacatgctttgtttaggagctaggtcctattgcagtcaccatctgcatggcaggctggaagaatgccctgagtcctcatcaacatttgctaacagtgtgaccgggacagtgtttttcttgtttgtaacatgaagctaatacctcccttgtggctgaacctacctcacggtatttagctggaagacattctattaaactccgaggtgctgttgacctgacttttcattcccccttgatgataggaaaccttgatctggatgccttctagtatcttcagttcgatctaatgtctgtcttccttttgttgtcaaattcaagattattatttaagtgagagtctagggatcagcaaatatatttagtaaagagtgagacagtgaatattttaggctttggggaccataaggtctccactgcaaataccagactctggcatcacggcatcgtaggtaaacaaatggcagtggctgtgctccagtcaaatgtcatttacaaaagcaggtggccggcggaatctggcccaaggcccatggtctgcagacccctgacatactccatctgggttttcctcctctgccgacctcctcatgccatcccctctctagccttcctttctgctgagctaggcaggcagtggggacagcattcatttagggttcgggtaaatctgcgggagcagaaagcatgtctaaggacaccatggaggcccaagccctcgaaggtcttctacccgtgtccctgtctggagccctgtactccaacagacatccctggggctggaactcagactgattctcccagttaatgtgatactcagtgtattagtcagggttctctagagggacagaactaatggaatatatatacgtatatgagtttattaagtattaactcacacgatcacaaggtcccacaataggccatctgcaggctgaggagcaaagagagccaggccaagctccaaaactgaagaacttgggtctgatgttccagggcaggaagcatccagcacaggagaaagatggaggctgggaggctatcaggatctcttttcacattttcctgcctgcttgtattctagctttgctggcagctgattagatggtgcccatccagattaagggagggtctgcctttcccagcccactgactcaaatgttaatctcctttggcaacgccctcacacacacacccaggatcaatactttgtatcctttaatccaatcaagttgacactcagcgttaaccatcacactcaggttgggcccttaggaaacttaggggcccctttaatgccacgtgggaggttcaagctgtctgtggcacttgctctgtcttcctctgtctacccctttgtgtctgcttctgtctctctgtctctctctgtctctcctcccctttccccctcaccctgcctccacttgcgctgctttccccaccactttggcggggaagcacctgcagaggctgcactcagcaaattccagctgggaaacacaattccagcttcccacctcccctgtccacttcagattccgcattctgggccaaggtcctcttttatcctacccggacatatcaaggcctaaggcgcgcaagttcctgttcctatttctgctgcactgcactgccctctacccttacccctgggaaggagggacctttgagggcaatggtcctgtccctgagctttgtgctcagtgtctccacagaaatcaccccttttcaggtgccccagagtgagggggaggcaaaagcaaatggagagaacattcaattaaaatcttcaatttcctaccgtcggtctgtggatcaagggagtgcacatctcccagcaccaagcagctccttgttatctttattatctttgttaagccttattagctttaggaaaagttcacccagaagaattcaacagagtcctttttgcccagggtgaaaagaagtccatcaggagtccatagcccattagaaaatcccaaagagagaccagccacaaaactggaaacgtggccagtctgagtggcccaggccccagggacaggagccacaggcctccagcccttacgctgggatccaattggctctgctccttcaggctccatggaggagcagggcaaggggtcccctggggactgagctcagaccctgccctttccaggctggaaggggaggatacaagggagcagacaccagtgtatggggacacaactcacagtttatcagaggtgggagaattccccctgaaaatcacttttgcaagagatgcctcaagggaatattaaggctgggtcacattttcagaatttcagaaacttttccagaactgttttatcttctagttgtggtgccagatggtaatgttctggtaaatttccgtgttcccaagtggaagggtttggaaatgataaacaaaacaaggtaacaacaacaaatcccttgtactacacgcttgtctttctacactgtccttgttatgtagattctgttagtcaggattctgtgtggctttaacaaaacaaaggtctattgctcccacactgcacagagggagcacaggtcactgtgtgtgtcacatgtgtgcactcggggcggagagctcccccctccattagtcactggggtcccaggctgatgggaactccaccacctcaaaagctgcaccatccgaacactggcttccaccagcactacagcagcaaagagaactactactctcttctcatttgttttctttctttctttctttctttctttctttctttctttctttctttctttctttctttctttctttctttcttctttctttttttctttctttctttcttctttctttctttctttttctttctttcttctttctttctttcttctttctttctttctttctttcttccttccttccttccttccttccttcttccttccttccttccttccttccttccttccttccttccttccttctttcctttcagacagagtctcgctcttgtcacccaggtagagtgcaatggcacaatctcagctcacttcaacctctgcctcccaggttcaagcaactctcttgcctcagcctcccctagtagctgggattacaggcgtgtgccaccacgcctggctagtttttgtatttgtagtagagatggggtttcaccttgttggccaggctggtcttgaactcctgacctcaggtgatgcacccacctcagcctcccaaagttctgggattacaggcttgagccaccgcacctggcctgttttctcattttgatgcatcggcccgagtgtgccatgccctgtctacccagtctccagcagatgccctgtctacccagtctccggcagatgccctgtctacccagtctccggcagatgccctgtctacccagtctccggcagatgccctgtctacccagtctccggcagagctagtcacatggccctgtataaccctatataacctcaaggggacggaagggagaatctgtcggagtgcatggatatttgatgagcagtaaacggctctgccacatcgatctcagcaccttttagaccctgttaacagctgctttagagagaaacattttattggccatattatttatgtatccattcattcattctaaataattattgaatacctctgtgctaaatatacttccagtcattgaggtcataatggtgagcaggagagaacctgcccctccctcttatggctcacaacaatgaaatattgtcatgtgacagatgctgtgataggcaagggacagggcaccccagaagcacagaaaaagtttaagtgcctggagtatgtcaggaaaggcttcccagagaagtcaagtctgcagctgacccatgaagaatggttggggatttctcccagtcagacctagatctgtagcagaaaatgcaagtcaggaatcctgcctccctgggcagagttagaccctgcgggtgactcccttctggagtaaggacagttaaggagtagacaacaattgttataaacagagactaccttaggctgattgttttccttgccttctccaaaagagtacacatcacctctccgaggcggctcacctctggggtctgaagttgagccacgtggaggaacttgctcaatcggcttctgttatagatatgaaattattaataactgggatgtagctgtgcatgttcggaccctcctcccagcagccctctctggggatctggggtgagggttgtagggagacaccttgctgtttaataaataatagaagagattcataaagtgtctgggaagcacattcctcatgcagaaatgttacggaataacacaggatgaataatagaaaaggttattgaaaaattcataatttccaagtgccagtgaagggcagctcctgtgcagtctatttgcctgtagaaaagtgattaaaatatatattattgtcctgtctataggaaaatgtattattaagtggatactagcatgacatttggaaaatccatttcattccatttagcagcaatgggcttttggctgctgctttgtgcagcaggtttcacaagcattttaataagccttttaaaaaacaaaaaggggattttaattatggcccctgcctcccagccatgctattgctttgcatttaccgttcctctgccaaagaaattttaaaacatataatggggaatgtaaatatcctgcctacgtttagcaggtccactgccaagaaaggaacctgaccgctggccaggaggtacttatgggctgcaggaaggcagaatgggagataggtttgcctgtccagacacaacaagaagcaaagcctcagtgtaagaggcccataatccctgccaagccttacgtgtcactactcttctgtataaacattcactttttttttttccatatgaaaccaggagttacttttgaggtctaatgagaaacagttcctatttctgaataatgaattgagtcaggatcagggatcatctgatttgcccatctgcttcttggcaaaatgcatctcctcagcttgaagatcatatgcccagtactgctcggagctggattctgaatagattcaggtttggagtttgggatggggcacctctccatgccttgctcagtattcaaattctcctataagttgggtaagggccaggaggcaggatgggatctgagaggggtgggccacgccctttcaacctcaacctctgatttggcttggacagctctgtggtctgatggtctttcggggagcatacagatggacagtggtggcagcgaggtcaccccagcaggtggtgtaggaactgaggcagaaggagcatgatggaccagagcaccatcacagtcccagtctcttccctactaactgcataagtttggcagagtcatctgacctctctgggtctctctgcattttaataatgaacaaaacctctttgggttttaatgacaaaaatagagcaatttacatcacatcatagttttaaacattttgtttaagacacttttgaataattaaatcatttgttttaatgaaatctcatttggacgcagataaaattgtttctctagttgaagagggattagggactaaaatgctcccacctcaaacccccttccctctccttttttttttttaaggcagccccaggaagcctgtagttctgattccacagggattcctggagcacagtatgaaaaccaatgcatttaatgatacagaagttcccttctgactacaagtttctcaaattgaattgtggcctgtgtctgactcattgggatgagagagaatggcttttctgtcctcatttttactcctgtttatttagtcatcatatatttatccatttattcaacaaacatttactgagaactgcacatgtgttgcatttattctagaatactggagtgagcactgtctgaatatggatcatgagcaagacatactccttgttctctctgatgaagcaacaggcacctaaacagggtgccatatggttcaaaacacaggaaataagagttatattgggggcacaaacagattttttactagtaaaaattatgaattaggtttaaaaagaaactaaatatctctctagtttattttttaggccagtttattaattaaaagtacttatttcatccctgtatggatggcagattgctactcaggcaggctgtaccaggatggtgcctcagctgctgaaatactgaaatagttcatttgggttggtgaatagatcctgccaaaattccctgaatggcctttgctgttctgttaccttaaacccacctatctccaacattttcttgattcaactattctcctaaactgtgttagtaaggacaggggtttccatcgccatgcagtgcggtgttcagagcctggtctgggtggttaataccagtatcttaccacttattaaataagtcgaaaatatccttctcaaaaagtcggtctcctcaatgcttccttttgattccaagttcccagaagactggttgtacttaatattcactccccatagagttcccagtgttttcctggcttgacaatcagatagtgaaactaacatccctctttggcattttaaaattgcttcagattctctacactctccctaggtgatctcatttaaatggcatctttatgttaatgactctcaaatttatatcttcagcccaaacatctctgagttctagactcacacatccatctgtctacttgacatctccacttggacacctttcagaaagctcaaacttaacattctccaaattgagctccctttttatgtgatgctatatatctgtccccatcgattgtccctatgtcagtaaatgaaccgccattgactcaagagctcatgctaaatgcccaagagtcatccctgaagcttttctttcacttaccacctatatttaattgtcagcaagtcctgtcaattctacctgcaaaatatgtcttgtaatcaaactttcctcttcatctccactactgccatcttagttcaagacacaaatgtatttctatccagcaactaaccagtctttcaacttctactcttgatctggctcaattaatattccatacagcagcaattgtgatagtgtcactcctttgctcgatccttttaatcttcctccattgcaataaaatccaaacttcattccctagaccctaagccctgcacctgtgtcccatgcttgcctctccccactaactcggtgccatttatcattttattcatgctaaaccacgtgggtcctctccatccctccaacatacccacttcagagtcttgactttatcctctctctgcttgggccagtgcttctcaattataatgtgcatatgaataactgggaatcttattaatatgaaaaataccattccacagatttagggtatgggccaaaatttgcattcctaataagctctcaagtgatgctaacactgttggtccatggactatagtttgagtagcgtggcttccgttactgccatcccagatttattgcttggctacttcctcctcattttaaaaaatcagcttgattgagatataattcacacaacttgcaattcacaagcttaaattgtgaaatgtattggtgtttagtatattgacagagttgtgcacctataaccacagttaattctaaaacattttcaagaccccacgaggaaattatgtgcccattaacaagcactcttgacattgtcccgtacactcagcactgggcaaccgttaatctgctaatgttcccacagatttgcctattttggacattgaatatcaatggactcatataccatgtggtcttatgtgacttatttcttccacttagcatcgtttttcaaagttcatgtgtgttgtagcatgcaggtttcataccccatttctttttatggtcaaataatatcccattgtgtagatctgctacattttgtttatccattcatcatttaatagacatgtggattgtttttactttttacctgttataaataatgctgctttgaacatgcttgtacaagttttagtgtagacatatatttttatatctctttagtatttgactaggagtgggtcatatgataactgtgtttaaaatttataggaaccaccaaactgtttttcaaaatgtggacacaccatttgacagccacatcagcagtgtgtgagggttccaattcttcgaatcctcctcaatccttgttatgatctgtctttttttactataaccttcctcgtgggtgtgaagtggtatctcactgtggttttgatttgcatttccctaatgagtaatgatgcatattttcgtgtggttattggccatttgtatgtatttgtataactttggaggtaggactattcagatcctgtgaccattttttaaattgagtatttgccttattattgagttgtaagagttcttcatatatgtgggatactagtcctttattaactatattgtttgcaaatattttcttccactctgtagcttctttcacttcctcaatagtgtcttttgaatcataaaagttttaattttgatgagattcaattaatctaggttttcttttgtcactagtgcttttgttgtcatatctaagaagctatttcatagcacaaggttgcaaagatttacccatatatattcttctaaaaggttttttttttttttttaaatttagctattatgtcaaggtccatggtaaaatttaaggtctttttttctttcctttttttggggggagggggtgggggagtaagaatcccacttctttcctttgtatgtggatctccagttgtcctagcatcagtttttaacaaactattctttctcccattgaattttcttggcacacttgtcaaaaatcaattgatcatatattatatatgtgagggtttttttttctggactctattctatttcattggtctatatgtctgcctttatgtcaaaacccacactgttttgattactgtaggctactaatacgttttgaaatcaggaaatgtgaggcctccaactttgttcttatttttcaaaactattgtgtctattgtgggtttcttgatttccttattaattttaggatcatcttgtcaatttctgcaaaaaaaaaagccacattgagatttagataaggatcatggtgaatcaatcaatacatttagaagttcaacatctactcttccaatctatgttcacagaatgacttttcatttacttgggtcttttaaactttctttcagtaatgttttatagttttcagagtggaagttttgcaattattttgttaaaattatccctgagtactttactctttttgatgttgttgtaaatgaaatgattttcttgatttcacttttggattgttaattgctagtgtagaaaagtgtgatttatttttgtatatttattgtgtaccccgcacatttactgaatgtatttcttagttctaatactttcttagtggtttccttggaatcttctctgtatgggattatgtcatctgcagacagtgatagctttaattcttcctctccaatctggatgcattttatttatcttttttgcctaactgccagtgctatgctgaatgcaagtggcaagagtgaacatcctagtacagttcctaatcttacagggaacgttttactctctccccagtaagtatgatgttaaccctgggtggtttgtatgtgccctttatcagggtgaggacgtttctttctattcctagcttgttgagtgtttgtatcatttaaagtttgaaaaaaataaataaaggtgccctattcaatttgaagtcagcttcaacagttccttggtagacagccctatttctaactgcctggaagcctcttcttggactatctcacctgaggcagcttcaccaccccactctattaatcattgtttcaattctgtgctttctcttttatgttacttatttaaaattgtaaatattctttcactattcttttcttttttctttctctgcctctctgctcccaaggacagtgagggaccaagtttgtccagttcactgctgtgttttttgtttgtttgtttgtttttgagatagggtctgtctctgtcattcaggctggagtgcagtggtgccatcgcagttcactgtagcctcaacctccctggctaaagtgatttgcctacctcagccaccctggctcaagtgatttacccaccttcaggcacacaccaccatgctggtgtatttaaaaaaatttgttttgtagagataggctctcagcatgttgtgcaaactggtcccgaactcttggcctcaagcgatcctcctgtctaggcctcccaaagtgctgggattacaggtgtgagccaccacacctggctgacggctgtattttctgcatctaccactgttcctggaatataacagttgatcagtcaatgaatatttgttaaataactgaataaataagtgcattattgatgtcctaggtagatagatgctgagtgattcctcattaaatagatgcagaagagactgatggccagtgactggacagcgatgacagtaatgggtttggaaaatagtagaaaaacttttacgatggaggatttcagtggccaagacaaaacaaaataacacatgggaacttgggaactaactgcaaaaagtgttctgtcaagggggtgggcacactcacaccccacctgacatcaggatatgttgtgttcagtagtctgagttgttagcaagtacattttgtttctttgtagggcaacaaagagcaataatagctattaaactctccctggcagtctaaaatcctaggcaatgggccagtgtgctttagtgagttttcctaccccagcacaaaaaaaagaggccgtggtttaagagaccacatgtggctggctaaatagacctctaaatgtatctttatcatcagtttcatctcatttcttttaccaccctggagttaagtctgtccatttctcagcctcctcctcctgagcccccatcgtgatcatctgaattaaaatctgttatcggtttctgggtaatcccctttgatgccctgagtaccgcaggatctgtgttgctcaaacctagcatgcaagtgctgatagcttttgagcagctaaaatggctttgtgtatctcacacaaatgtctgcatcacttgcgaccagccaggagctggcaaaaaagacacaatttatggctggagattttatgaaatggtgagcaaaattgcctttgagggtgactcaggaggcctgaagctgctggccttcttgccattctttgttcactcccttagagagaagaggaatggggcccccatgcctctctgctgttttgcggttatagtcctccctgtgctgtgttttgtttgtttgtttttataataaatcttgcttcagtaggttatccttgggtcacatccgtggccaaagtagaaattaaaattttgcatgaacaagtaataacttcacctgggccaattaatcccaatcatgacatgacccataattgcaactttgtcatttttccatttctttcttccctcaatgatggcctctctctcctggggtaggggagtatgtatgaaagagcttggggtcagggttagcagagcctgcctgtaatgaacactagttgcaaaatgctagaccagctgtgtgaaccctccaacactcatgcttttgtctataaaacaaggtctctaattttcatgtagcatttattaaaagagaatgaaattgatgattgttgtacgtatttaccatcactctccatgctagattgtaaactggactgtagactccaggaaggcaggtgatgattctattttgttttctgtattgccaaaccttgtacgcacggtttgatcggtagacatttttggttttttgtgttttttttttgttttataattattattattatactttaagttctagggtacatgtgcacaacgtgcaggtttgttacatatgcatacgtgtgccatgttggtgtgctgcacccattaactcgtcatttacattaggtatatctcctaatgctatccctcccccaaccccacaacagtccccagtgtgtgatgttccccttcctgtgtccatgtgttctcattgttcaattcccacctatgagtgagaacatgcagtgtgtggttttttatccttgcgatagtttgctgagaatgatggtttccagcttcatccatgtccctgcaaaggacatgaactcatccttttttatggctgcatagtattccatggcgtatatgtgccacattttcttaatccagtctaccatcgttggacatttgggttacatttttgaatgagtgcatgagatgacttgataggaaagaactcagtgctcaggctgtcatagaataggtgttcaggaaatcatccttcctttaccagtttgaatgtttctcagatgcttcatatcaactgacagtttagaaaaacctcaattaagaaagaaagttcttttttttggagctttgtccatgtgaggatgtcccatcatttcttatggtgacaggccctgacagcctcatgcctcctgaccccagaggctgtgccttaatcagatgtgcatgaagccacggccctcgattctaggccttgctcctgggaacatgtccattcccgcctttcttttcagcctatcaattattcctcgctctttttgtctttctctctctcccttttttacatcccctctctctctttcccgttttccctgtctctattgctctctctctttaaatgtgccctgtttgtagagctttctctgatattttctggcccagttggttcatttattaaagataagatatcttcagggacgctggattcaatggtgtcctacagtgagttgacgatggagtcatgatgaaatatcaaacttggaagctcgaccctataggctttcctgtgtttatgctactgacagtagatgcaaatagtagttaaaataataatgtaaaatgttttcttaaacaccaggggagctcatttatggaaataggcctattcgcatgcccaacagttaaaaataacaaaactgggggtgcatgggtcaggatgtggacaggaaacatccaccacagttttctctgaacctcgggaggctgagctgggcgaaggcgtgggccctgcacggctctctgcttctgtgctctggatgggagagatctgactgccagggttcctttccctgaggcacgcaggcactaccttcctgacaggtttttctcagccacactgagagcttaggcctgggttgcttgagatggtgtgctgtttgcattgttacgcctggcttaatgataaagcttagaagtgtggtcaaagtcctattattaaagtcatttaaacccagacaggactgagtctgagagaatgcactgcagggaagcaccttgcccacactcagtagtggaagctgtgacctaagccttctccatctcttatttcaatttccccatgtctgctttcatgctgtgtggtttcctgactgtgactcagtctgggtttccatcgcaggcttggacttaatcccgagaagatcgaagacgtcttgatggggcaaggcattggaaaagcagactgtggtttgcatttgagctggatttatctctggtgctttttgtatgagtaacaatgccaagccctgggtctgacccttaatagattcttatttgcagaatgtgtaaataactactctcctttattcactcctcttgaagagccaaacatgcttctgtcttcaacccttctacccagtccctagttcacttaatataaatgctaattaggatgtgggtttaaggtcactcttccctctcagggagaagggaccaaacacaggctttccatctgcagaggttggcagagctcaggttacctgtttttcttttgcttctaccccttcatctagtaaagaaggtgggtatccctgctctttgtaacaggagaaacacatttctttgtttgagtcatttgcacagttctggcaaaatcaccctagcagcatcttgtggaaaacaaaaatgcaaaggcacagatgactccagcttcccacagtgggtagccctaaataggacacttgccaatggcaccaaaacaatcgttaaactgtccaacaacgagctgggtaaactgagagaaaataaacctagttcaagcaaagaaacaaaactagggactccagcaagggcggagtaaatggagtgcctcctccacagggcaggatgctgcaagcccctcatgggtccagaatcaaaggctttggattaaaccatggcaggaaacccagctctttccacccaaaacaactgctgaaccagaagaggaagaaagaaacccattaaaaactttgttcctggggcttttattggggcttttggcccacggaattcattagtaaataagtgcagaattcttctcctatgtagaatagtgggctcaacccagctgggcaggcgagatccacagtttcatttagaagaagactgttgttcagaaagctctgcaccaggagcaaggagagcttggttttaacacaagcttacacaatggggccaaggagcagagtagatgataacctgacttagggtttaagtgaggaagcattcaggagaagctccagcccctgagaagtgttctaggaggctgtggagcacccgcagatcgatagcatctgggcaggcagggggtaagaccacactgggaatggaggagggcgtgagtagtagcatgagatgaggatgcttgagttggtgggagtgaaacatatgtggggatatgctatgaaatgaacgctgaggatcctaaatgctggaccaaggagtttagacttgatcctgacatcagtggagaaatgctgaaaggattttagagcagaagagtgaaatgaaagtggcatttaagaaaaattgatctggtgaaagcgtgcagaatcgattggattggaggcattagaggtggccagacaaagagatgctgatgtaaataatgggatgggagctgaggggaacctggactgaggtgtttataagaatgggaaagaggcgtggaggagggaagcagttcaacatccatctctgagtgtaggaagaggcatcggggaccaaggaagctgaagtgacgctttgggtttttagcctttgcacctgaggagggaaaaggtggaaatatggtcaaaaaaatgtgagtcaggaagaggagctggctttaggaggatgatgaatgtggcttttcttaaacttgttaagtatgaggtaatagcacgatatcctaggataggaaggtagagaaactcaattagaacttgagcttcaaataacaccttggatctgtgcagaactaattcctggctcctgcatgtatgatagcattttataatcacacgctacacgctgcatatgaacatgaatgtggtaattacaggataaatcctccggctctctgcctctccggctcctctgtgtggaatcagattgctctgggactgagagaacaatagatcaaaggggaatccacttacataaagaaggaggaaaagcacaaggaagaaagacaaaagatttttaattcaaaaggagctgaggacctaaacacacatcactcctattgctaatagcaaggaactgcagctagaagcagaacggaactaatgagaaagtagaggcattaggaaggaagacctcgtgctggaactgggctgcaattcggtggtggaacagaagttgccagagctaatgtaatgtgtgaaacatgtcaaccaaggtgggaaagaccagactttccccacacagagctatggtgatttacttacatatctgtgttcgtgaacacatgtttctgaagatggtcagaagtagattctgaagattaattgctaactgtggcagccatccttcaaggatgacttcagggaccctcacctcctggtacacacacccttggatagctcctttccacagtctgtgaataatagaaaatggcagaggtgatggcatgtgacttcagagaccaggtcatagacagtattatcacatttgccaccacatcctaaggggaaagccagccaccacatcctaaggacatttgagcagctccttagagaagccctcagtcatcaccagcactgatttgccagccatgtacatgggccaccttggaagtggatccacccacagcagtcaaacccctgcctgcaaccccagtctacctctgacttcaacctcataagagaccctgaagcagaactgctcagccaggctgctgctgaatgcctgccccacagaaactgtgagcagtagcaaagtgtcatggtagcttaggctatggcctgctttgttatacagcaacagataactaatacgctagttccacaaaatgtactagaactgtggagagtgctcctcgcaatttttattgtgaagaatatttgggctgctgtgatgcgtcaccaatctattgaaatgtatgaataaaatgttttcagccaaagtctatccaaaagggtgcaaagcctcatggagggaagcaaagctcagaaaaagaaatggatgcatattagatgtcaaacatgtgcttattgagttaaattgaattgaaattgcagacagttacagatgaagcactttacattgttacctcacatgtttatcgaatgctgaactactgacgacagcgtgctagtggaaggcttctgtggttaaacttagcacagtggaacaccagttggcccagccacaccagttggcagatgtgctgcagggccccactaagagcagcctctctggctgagtctctgggcactgaacagcaggaagcctgtccccaaatccctacccgggtccctctgtggcctggttgtcatcgctccctctgcctctgctgcaggagctggcagttttgtaatagtcacagtgcagcctcccctcatgtaaagcaggtggaattatccatagctgctaccatttgaggcagaagcttagttccctggggccaggcacatttgaggacactcatgtgtgctgcacttccgtgtgcctccctggtctgtcctcctcattcaagcttctcttcctccattcccacttcccttacagaactttttccttttccatctagcacacttcttgcaggaaagcatgggcagggagcttttccctggtggctggccatcaaccctcaggtctgggcactctcctcgccctggaagctcataggccactccgacaagcagaccctgatgccctccccacccatcccactgaccagggacacccgcctgacttcgtagtttgcccaagcctgggcccccgcccaagttctctgaaatcgtattttacagttattccaaagcccccatggtcctcggtgaggagcacatttttcttccagctggtgcaatgaggaggtttcagcccccatcctcaggtggctcctggggacaagctgtcccctcctttctgatattgattcccaaatgccagacagaggagggaatctatgataagacgggcgcttctttcaaacctagtaaatattataaatctactatgactcaagttcaaccgtctcattttaaaatgtgactaattccagcttctgctggtgtgccttgctgaagagccaggcgcgatgctgagaacagggcgtgtgtggtcacctttcatccttacccactactgagaggtggaaccagctctcccggttcacaggagacgtggagactccgagaagttaagtcactagcccaaagccacacagcccgtaagatctgagacctttttatgccccactctcctaaagctggcgggagcctgggaacaccacgtacctgccttgctttggtggctgaggaaacagaggaaccctggtctctggttcctcactcctggcttcctcctactcccggctgcctccctttgtctgtgaaattctctttctacacgcagacatgcaccatgtttttccctccctgctctgcagaaaacctcaaatagtggtgtcatagaaggacttatgagtagcctctcaatacctgggtgcaccatggggcggagatgcccaggacttgcaaggttcactgagatctggggcgatgggctaccgacagccttgaactagaagcacagactttaaggagctgcctccctcagcgggagctcccttctcatgatgcagaaaacaggcctctaaagagggaccgtgagcgcagtggacagggctctacttctaggatcatccctgtgtgacctgaggagggaagtggttcccataaatgccccatgcccagaagggccgtgcagagttcggaaggaatcctgccccatgctccatggagacccaccctggctgcagctctgttattagcaattacagctctacgaaggaaaataaacactttccccaaaatgggtctgttctttttgttttaagctcttattcttcccaaaggggacaaaagtgctgatgatctgcaaagctgtgaggggactagacaggagggcagtgacccagagaaagcccatggggcaggggtgcaggattattccttaaggccagagctagtctgcagctcttctgtgccatttggcccagttttctggggccagctctgggtgactttttctctgccatcgtcactgctttgtcagttcttgttcaaaggtcccctgagttgtacaactgccattgtctgtctcagacagttcttacactctcaggtctcagagcacataaaactgttgcagctgcatattgtccatcaagactatgaaattggaaaacatgcttggatttagaatgtgttcagttgaaagtgagacactggagatgcctccctcacgtgaccagcagcactggccctgcccgcctggctttgattccagctgtttctctcacattctctggctggctcgccaagctcatgccccctccattctgccctcgcctcctcccacccttgacctttgtggtgtggtagaagcagatggtcttgcagccagacagaggtttttccccttgaagttgctctccatcccaaaaagctggtgagcagatacatttctagacaaagcaatattctatcttaatcaaggcagcacacacaatggcgaaacacttggactgagaaattgggctctgagagacctgggtgctagttctgtctcttttgaacataacacagtctgggactacagtccagttactgggtctctcagcctcagattcctctgtggcaatatagagatgtcacagtatctgcatcatggggttggcaggcgaagtgaaggggccttcaaagtttagcactgtgcgtggctcatagcaagttctctctctctctctctcatttttttttatttagacggagtctctctcttgtcacccaggctggagtgcagtggtgcaatctcggttcactgaaacctctgcctcccaggttcaaacaattatcctgtcttagcctcttgagtagctgggattacaggcacccaccacaatgcctggctaatttttttgtaattttattggagagatgggatttgatcttgttggccaggctggtctcaaactcctgacctcaagtgatccaccctcctcagcctcccgaagtgctgggatcacaggcgtgagccaccgcacccggccgtagcaagttcttaatgaacaggggcctctgttgtgttatgggatgttcaggacatggctcccgtcagctcccagctcccagacagcagggatttttgtaccatgattattttgtgaaccctctggcccctaaggctgtgctgagcctgtgcatcccagggagcttactgagtcactgtggaatctgctgctgaatggacagcccatggttgaggccagtgaacacggcaggacctctgcttcccttgggcagcggctggggcgtagcctagagtccttcccagagccgaatgtaagaagcaaggctaagcgtggctgggtgagtatattcagcatgttagctgctgcttcacatccttgcgtggccctcaagagaatcctcaggacacgctatccagggctctgtgctgttctcagctgatgcctctgttcctgcaattgcatggactctttcatcaagaggtagcaaatcatctacaaataagggttacaggctctgtacaggggacagagatgaaggacaaattgcatcctctgcgcagcactggggagactgcacctgtcccgtgccacctcccagggcaggtccctttctccttcctcacccaagacaacctgctcaacatccctatcacccagaaatggggcttgggagttggaggacagaggaaaaagaaacatttatcaaactggagagtgggaaatgaccgcggacggaggcaagggagagagccaggcctccacaaagcagagaggaagcaatttgacaacgaggtgaaaattgccactgctgattctcctgacactctgagctttacccatgggcccagggaaatctgtcactggctcagggaaacgtctgcaaggaactggtaatagtttagcaatggcctagtgacttagaatgagatggaggctgcggcggcaccaggggacatacctcctgtttttaacccaagatgatgagatacggagacagttctcttccccacccggctcctctggtgactgagccaatcagctcaaaaagccacagggacagagagaacatgcggtcaggaggaaactcagattgagacagggttttacaagcacactgtcttgagggggtgtgtgtgtgtgtgtgtgtgtgtgtgtgtgtgttgtttggtttggttttcctacagctgttttaatgaatgcaccttcccttcatgcagccctcctcctctgtagcatatctctgctttatggcaaatgggttttgattctgaagcaaattgaccttgaaataagttccaggatttgagttcttacaccccagatgctgggtttggaatgcagactgctcaatcagcagattccagctccaactcctgcatctggagggggacactgcattttgtcaaactattaggcaaagtcagaattgtggggctggacgctgcgaggctggggcaggcagaccctaggtgtgctgccgatgtcagggttccctcggtccttctctctgatggcgtgtgtgtactcctgtgtaactgaggccgcttgggaatgttgcagagagtgctgagagtggagggctgcaagaatctagggtgacgtggctacagagctctgatcacaaacccatcatgtcacagggaaactgagtacactttgcggaaagaaaacgtgtgcttcgtacgtgcatatgtttaagaagatcatcttcatcttagttttgctgagttcccgattctactgcgattgtgattcagggattttgttgtaacagacccaaaaacagcaagtatttattgagcatctactgtgtgcctggccatggagcaactatctttaaagtgaaagtatgagctgagctgagtcccctcgtgactgcctgtgctcagcatgaggcaagcgtgtgctcaaggctggtgtctgagtgctgagcagtatgggtgatggatttaatttaaaggagattctggtggctttaatgtgtccaagcgttatgttgttctgagctgaaagatgaatggaactggcaatataggggctcgtgtgaacagaactaaaatgtcctccaccaattttcagcttccacaacacaaaggattgttgaaactcagttctttcccctggggtttttgtttttgaggctgaagcaatgaaacagatcactgcaaagacaaccagaagccttttgtagatgataggggtgaatctagaccagaaggcagataggcagggggttgggagggcgagccacccagtgtgccgtctgaccttgagatggacagggagggggctgtcttagaagaaccagagcctctgggccagcgccgggctactctgatgtggcctgggctacagcctttgggatgagagccaggcagagaaataggtagggagttggtgttaaaaaagcaatcccagaaaggcttgaggctgctcatttgcaagctgtgcatttcttttccagtaagggagacctttgggagtgatttttacagaagaagcagttaggtataactctggttacagcagaaattcagcacatccaagacctcaaaaggcctccagaggttgcttagtgcagccccttcccccaagcaggtctgcgcctacagccattccagaacaatagtgtttcattttaaatatttctcaggaagggtatttcgtaaactccctgatgcactggtaccaaaacaaagcctagcagaaaaagaaccaaattttctctggactatggccaagtgcaatccaagatggatacagatgttgcaaaagcagccagttagtcagcaaatgtgccaatatacctcttctctgtgccctctggtgacatgctatccgaattaaattagttcagtattgcttggggctcctatttgactctgattcattccggtgggagcagcgttttaagttcaaggaagagaggtgggcagaagactttgctcccagtaacatcaggatgtgagcccactttaaaacctcccctatgctcagataagatggaaattgagcttaaatgctagttacacacgttctataattgtcttgcattttagcaaattcagggataagtaagtattgaaaagccaacgtgttctggaagcagaaggcttagaacatgttctatgcatggatagacaggaacatgttccgatgagctagaagttgtgtgcagtagaagactgcccatgtgtatccatcaccaactatttacgccaccaatgcaagatggtattcctgaagaaatgagagtgaagacatagaaaatcataattgtctggcatgttttcagagcatatgtagagtgattaggtaggacaaaaatcctgtgaataaaaatatgatgagaatggaagaactagtgctaggctcgagaggtatgcgaaaacaaacaacaacaatagcaacaaaaagatgtgaagagctctgcctttggagggcgtagctggagtttctgagatgcagtagcactccacagcgaataagcccatgagagaatgcacagacatacagtctgacgacaagggaagcatgctgggcattgagtggcaaagcccgaataaggaaagtggaggcagtcaaatggaaacctgccatggttatcaaggaagtttcctttctccttgcaccataaaataatagggggaggcagccaagacttgccagtctcccaaatgctcccactctaactttatgtaaaacacttgacacagtcagaaaaacctggaacacatatatctctagtaacactgaggctaggacacacaccaaaggctgtgggagtacagaggatgagcaactcttttgcagtagctgaaggtcaggaaggaaaagcagaaagaaagaaattgaaagtagatatggatttagtactacgttgcagcattttgtctttaaaaccatagtttatcagactaaaatggtggggcattggcaacagacagaacacactcaagaaagagggaagaaagaacacaattggccacaaagtgaaagagtcaagacgcaaatttttcatgaaaaggagagatagagccaaatggaattaacattagattttatgaagagcagcagacgtggtgtagaaaaaatgtaacagataagtcacccagtaaaatagcaaataaggatatgggggtaacatctaccgctaaacatcttctttttttttttttttccttgctctgtcacccaggctggagtgcagtagcatgatcttggctcactgcaacctctgcctcgtgggttcaagtgattctcctgcctcagcctcctgagtagctgggattacaggcacacactaccaagcccagctaatttttgtatttttagtagagatggggtttcaccatgttggccaggatggtcttgatctcctgaccttatgatctgcctgcctcagcctcccaaagtgttgggattataggcatgagccactgcacttggcaccactgaacatctcatatactaaagcacacaataaaaatagccagtaaaggtactacgagactatatccaagagggcaagttctatgactctaagtttgaaataaagttttctttacagacattttccctgatttctaagcctcttcagctgcaccaagggtctcctcatgtctacagctaaaaccattttcaagtcatcatcttctttaaaatccctttcctggtcttcctacctcttcccatctcccttcctattcactactcatgaggcagaatgatccttttcaaacataattagaccacatcactccccacttatatctcccagtgacttctcattccatgtagaaaacaattcaaatgccccatctggctcacaaatcatcccacatcctggctggcccatgatcccattcctgtcacctccccttgctcactcagccccagctacatgggcttcttgctgtccctcaaacacaccaggcataatcctgcctcagggccttggcacctgctgttccctctgcctgaaatgctcttgcccctgaaatacatatgggctgctcgctgacttcactcaagtctatgctcccacgctatttcctaatggagtgggtccaccacctgcaggcctgcactgtccttcttcataacacgtagtgctctgggattgtagatcacatatctgcttgttattgtctattatctgtcacttaggctaatatgtactttctatgatagcagcagttttgtctgtcggtccactaatatattctccatgcctagaagagtacttggcacatagtagatgtccaatagctacttcttaaatgaatgaatgaatgaatcataacgataaattacgctaaccggtgcagcactagccactaactaatgtgatgctgccagacacaaagcttgtaattgtatgttgaaagaaaacagaaacctgaatgatgtagcatgtgagagcaggaagagaattcagggttaattgagctcactccctgttaaggtaatgaaactcaaaatgtctaataatttattaatgttcacataactagtaaatggtggcccaggtattaatttacgtctgtgtattcactggccagagtcttgcttgtttacactacccagctaggtatttatcccctaaaaactaggattctaatagaaaaagccaaatgtactaagttgacaataatttaagaacaggtgtaaagcatcactttttttgccaagtggtcaggagatgaagaggggagaggagagatgttcctgggggcatctccggagaaagctttgtctgtatgcttctaaatgacggtcatggccaaatacaagggcaagtgtgctgtctgtctctaaatgcagaccacacatcaagtgccaccctgtcaaagaggaagctacaggcctggattagtggtgtgtgcctataatcccagcaccttgggaggctgagacaggagaattgcttgagtccaggagttcaagaccaggctgggcaacatagtaacaccctatctttacaaaaaaaaaaaaaaaaaaaaaaaaagttttctttaattagctgagcatggtggcctgtgcctgtagtcccagctactgaagaggctgaggtggaatgatggcttgagtctgggaggttgaggctgcagtaagctgtgattataccactgcattccagcctgggcaacagagcaagacctcaactcaaagaaaaaaaaaaaaaaaaaaggaagctacagacaagtggggaaagaattatttctatgtggaagctttcgagaaacagggccaatatttgggggcctagataacaaagaaccatatagaatcaggggcaaaatgtcctttcagtctctctttggaagtctctcctttgggaaagtacatgagccaggaaagccacattcctgagaagggtcccgtggctgtggtccaggcaggcccacactggagaaatgtgtgggcagaagacattagcaaagggcctgagtgggaggatgggggggaccatccacaggaagccaaactattccatggggaaaatggaacagaagataaagttcctgtaattaggtaaaagtgctaaaaagccagcaagtttcatctattaaatataatgtgacctgacgggtacccgtgagctggtaagaacagaggaaagatgtataaaaataaaataggtgaatatatgtttcatttacttcttagtttgcataatcataagtaaacaagcatgaaagtgatgcctcgggccccgggccatgtccatcctcggctccacagttcagggacagccgctcatttgtatgctccgtgtcgccaagattcaacagcatttggggaaagaatgaacaaataatttatttcttacttgaaaagttaattcatttctattaatatttcatttattacctctaaattgaccagattattaaattaaccactatttggtagccaaaattttgctgtacacacagaatataaattgatgatatctactccgtgaccacacagttaagaaagcactgaagtcaaaggaagaaaaacggcgtaaatctgcttcagttctgcccctaggccactgttttcggtcatgttctgttgcaggcaggatgagacagtagagatgtgtcctgatgttcccctccctgacaagagcaccccagcaactctcctgttggcccttgagctaacaagctgagcaatcgcaccgaccctccaggagtgctccttgggtggcattcatctgccaacatcatgattttgcatttgtcactaacacactggttgccttccgtccaggtgctctcattggtacactagacttcaaattggcgttctcctgaataaaacagaaaaagagaaagaggaagaggaagggaaatagctctgaagaaacaacttatctcaaacgatctcagaaactcacctgcttaggagacccacagcaatcatggggtgcccatagacacaggggcttctctataccggagttttactttataagcccaccatgcagtggagagactaccttaagtggcagtgtgggtgtgaagtttgcaatcagactatcaaggctgacttttgattctcttgtgtgatcgctgggtgaccttgagaaagtcactttccttctctgggcctgagccccttccttggcagcatggatggacatcctacctcccaggactgttttgagaatccagtggaaatatatgtgagaaagatttgcacccagtaaaaatcgtatacaaatatgagatatcattagaatgagttccttttgattattccataactaaagcccttggctcaagtccgagacagatgccatgctgtccaccgaattccattttataccaaatcatgttagagagtccaaagtatttccattttaaaatcccatcttcggctgcttgcatgtttaaatgaaaattcatttggatagcagcatgctaggagcaagacagcagtaactaaataaacaactaatcagcgatgggttaggcctctctatagggacgcggatggaggacacttgcagtgcgcctgcctggagtgacccccgcagatggttttgggctccagtgtgtccccctctgggccaggcccactctccctcccttgggaggaagcacacagcccaatttaagcacccaatgtgtaggctgggaatggaaaggagataatggtgtgtgtttgctttgttaacttatccattttgtatcctgcttttcttccactgttagccaaggaaaaacctcggggctgccgtagctgggcaggaggaaatgaagggcctaccctggccgctccgaccttgagtctcctcatccactctcacccacaaaggcagttgctctgaccgaggtcactaaaggctcttaattctttctgtgaaagacagtgatggagccatgtcagggggtttttgccccagtcatttcctggggcaccttgtactctgtgcagaggctgtgtcctcacatttgtgattgaaggcacaggcagacaatagggttcagattccattttcttggctcataagggcgattctctggcaggtcccttagtgcggtccggcctgggtatcctgtccctctgcgtcctgcccttattcaaggaccagcgtttccagcacatcattcagtggcaacatggcatcgtgtctctgcatttagagggccactgatcagcactgtgatctcaggcagctgatctcagatcatggcagcacagtggtctcattagcgtcctcatctgtagaacgggcacagcactatctactgcacagagcagtcctaaatattaattgtggtcctgcaggtacagagctaagcaagtgtctgtggcctcataagccagggacatcacaggaggtcttcccagtggctcccacccagagctcatcctgctacaagttctgagccattggagagctccttctattatttgctgattcattagggcctgcctttgacagtaggactcatggccactcatagtgttgtattactcatagcacttaacattttactaagcataggatggacatttaacaaatgattgttttgtgctttgtgaagtcagatgtgcccatccacgctaatcacggaggaatccacagcctgtgcacagggcgagtccctctatctttggttcatgcttcagtttgctggagccattcattcattctttcctggagtatgtctcacatgcctaccgcatgccaggaatccaggaggtggtgatgatcaggcagccaggatttctgtctccacagagcatacagtttagttggctgcattcatatacctaaagcatttttgctccctcaaaaaagaaattatcaatgattccaagtacttaaaaatcaccataacctgaaaagcttgctgggttgtaagtaacaacctcaccttattctgtttatctgtcactgagctggaaacagttacaaagtaggatgtgctacactgcctattgagtttattttgtcttttatacagaaatcaaccttgtagaggaaaccacatcatttaaaaaaatactcaagctctattttaagggtgtaaagtgatcacattttctggagatgaatgtgtccctttgaaagcacctgactacatcagaggccgaaatgcagatgtggggggccaccctgataaggtccccccatgatggtctttatggacccctctgagcaaggggagactctcttgttccatttctgaaaagtggcagaggaaggaacaggtgccttcgggattcagagttaatcaaatccacaaaaggcaatccagtcgcttcttgggattaatagaaattagtccactggagacttcttagagaaagaaaagcagagagagagacaaagacagagagacagacagacacagagagagactgaaaagatgaaggagggaggatagaagaaaggcttcatttttttttttcagataacgttccccaataacatacatatagcctggtgcacagaatgtcagctcaatgaattgtcacaaactaaacacactcaaataaccagcatgccaataaagacacagaatgaagcatgcaggaatcaccaggccctgttgtgctcacagctgccctcttccacaggttaacctccaacttgatgccagcctccctagataagtgtgcctgctttacaactcacatgagtgagatcacagagattcttctcctctgtggctggcttcctctgttccacatgtgtttgtgagatccaagcatgttgtggcctatatttgtggttgtcactctcattgctgtgtagtgttccattgtgtgaatatgctacacattattttatgtactgtactttcgaagggcatctgggtagtttgcagcttttatctgtggcacgtggctacagtgcacatttttgtacaaggcttttttttgtgaatatatgcccttatttttataagggatgagataaattcaatttatttattaaaataaatttaattttaagaatccaagtaactttatagatgttgaaattattacataaagagtcatagaagagaagtcttcaatgttcaaacacacatggagaatatacctattaaatagtactgaggaagatatttaagtgtactgagacacttcttcaaatatctctttgtagtgattagtaactgctgtagtgttaataattactaatactacaaacgtatatgatatacgtaattactaatatacaaacgtatattcattattataaatgctaatgcttggttgtttgggtaaagagttctattttgtccctaagatgagtgaggacctgtgtgaaatacatagtagttgctgattcacacttatagggaagttgtctcttcttccaaagggtggcagcttacctcagttgcaggcaaaggattcctcaataggagatgatcagctttaaaatactggtcttgcaactcctcacgtgtaaagcaacaacaaacattgcaaaccaggacgtgatgggcaaaaggggaaaacaggcattaatttgaagacatttacactcactcaaatgattgaactggaacccaagaatctgcaaggaggcgaaggctcctagacgatctctacttattctccatctgtgacctgcagctagacttcttccatggcccagttctccccaacaaaacgattgccatcctctgcttcttaatgtgccaagaaagcaaaaactaactaaatgaatgagtaaagaaaaagagcccagcccttgttccccgaattgcttcctccacctgctcctaatagggaagccaccttatgaattacagctgcctgggcaaagctctgaggaacctgtaggctatctcacttccctttcacccgctgtagggtaatgagatgcgaggatctggcgtgtttgacaagctggttgctccagcgggctcaggcgctggaatgggagattaattgatgctaaaagacacagtttgatgtggcaatgaaatttcgattataataatctctaattatcttgtacctcgagtgccctggctctcccaggtgtttcttcttggttggaaattgctatttgtgcatgaataaagcaggcggcttttatttatttattttttttgtgggtttgggggtatggggaaggacgtaaataggagtggaaaaagaatatacactgccacgtttgagagcagaggaatgtctgaggtagagtgtctctgaggaaagtatagcattcgaggaaagtaaagttcacattactttatagcaaatgttactaagacaagataaaggcaaacgtaataaagatagtagactaaactggaattcttatatcttgactattgatggccaggcaaggacctccatgactagattataccatctctaagactattggagaaaaagggtcaaagacaaaattaaacctcatctgggcgggcaaggtggctcatgcctataatcccagcattttgggaggctgaggaaggtggatcgcttgagtccaggagtttgagaccagctaggcaacatacttacaccccatctctacaaaaaataaaaaattaacacaggcatgctggtgcatgcctgtggtcccacctaccctggatgctgaggtaggaggattacttgaccccaggaggtcaaggctgcagtgagctatgattgtaccactgcattccagcttggacgacagagtaagactctgtcttaacaaatgtatatataaagcctcatctttccaggtgccattaggagtcctctttataatagggattccactctagaaaacgaattcaggtttccatgttttagtgcttggacaaaggaaatagaacttccatagaggagaagaaggatttctcactcccatctctgacagtgtatgccctaagtcccctgcaacttaaatgtctatggtaattgtcatgtttgcaaagacaatgtggactattccaggctgtgaaactcaaattcttcaagattgcttagaaagttgggaggacccacgaagccactaagggaattgacagagtccaccttctggaagaacacagagggaggatgtgaggagacaatctcccacactccacacactctgcaaagcatcagacttattcacagatctttcacgggtgaccccttcctcccagtaattaattaacttctctaaatctgtttttctcatttgcaaaatgtggaaaagttattaatagtttatgaagattatcttcctgtgataataggcccggcccagtatttggcatgtaataaatgcttaataaacacagttatcaccaagaatattttaaacattctcaagccctttgcccaagcgcacagacattttacaagattttaggtagaatcacgagtgtgtgtctgtgtgcatgtgtgtgtgcacgccagcatattggaactaactgcccttcaactttattttgggcctgtctggcagccaagagtcagacaccaaatggtactcatgtctctctcatcctcactcccagtactaattatcttgctctctaagaaaatgtctgcctgcccctgagccttcttacctgtcaggagtattggtggtgcctccagaccaagggacacctgagttgaaaactggaaaggaccttcctcactgtaagacactaaacggtgggctgaagtgctaaagtgctgttcatgtttttaaagaccgaaagggggccctgaggaactgctgcagctctggggcagaggcagatgtccagttggggtgatgggccatgagcccaagagccagggctgtggagtacaggcggagagtgtggcaggagatgggcatggtcctgcccagaggcaggtgctttgctcattttggggcatctgtgcatggtgtggtgtgggtggggaccaagttgaaggaatcggcaataagccgtgtctgtccgatctgttttctgctctatgttagtgcatggattaggaatagggagatttgggacagtgcccttgtgcagcttgtggctgagggtttgaggaatttttctatcatccctttaaatgaagatgacagaggtcttcccagggacttaataatagattcaattaagagtaaggccatgtggctgcaaatacattaaagattttttttttccattctgtagaacaagtacagaatgtctatgtcatttcaaaccaggctctcttaatctgattatgtccagttgtgatagaatggagtcaggctttgacctgagcccaaagaagctgtcctgtacccacccaccactgttcccagcttgcatggctgctcaggccctggaagggtcttacacttagaaaagctttatatccttacatgaaggacagaacaggcagctatatggtgaagaaatgtacagacacaaatatccatatattgaataattggctggctggggagaatggaacactctgttgcctcttactcacacttatctgcttaaaatggcttctactgatggaagccccaggaagaaggcagcttgcttacaaggatcaccctggaggatgcatggctacatgcacacaatttcgaaacgagagtatttacattcggttggtgcagctgaacagaggacagaacctcatttgctttccattacactcacacttggtgtgtaagggtaaaggactcaaactggtattttgctaaaggagtgtatctgttaggactaggtttccttgcaagtaatggaaacctggaaagtaaacacttaaataatacagacatccatttttcacatgcaaaattctgaagatagggagtcagggctggtgtgctgcctctgtaatctcccaggatctgtgctcctctgcaccatccctggtgtgatgcttgacctcatggtctcagccagagccacagccatcccagaattctcctttcaagcagtacaaagggaggaggaaaggtcaaagagcataagccaactgttttaggaaaattattggaagctcccacacaaccctcctgctagctggagcttaatcacacggctccatctaccggcaaaggaggtcgggccatggtctattgaaaatcaatgattctatgaaggtgagaatggatattggcatagaaagttagcaatctctgccttggatcaggagaaatccattacatttaatatctaaaaatctgatattcccaggagtagatgcttctcaaatatatattgttttctctctgccaagccgtaacttaatctcttgtgactaatcctagcttcaaagatttggacaagctctttagattgaatctagggaaaaccttggaaatattcaagtttgctttgacttttctgtgttctcagtgtttcttttttgcattctacttgaattaaagaagaatctttgcatgataagagtttactgatactggtgatcggtcccacaaagtatttcctcttccctctgcattcattcactttgcatagtctgtacagcccagtaatggaaatgtgatctacagtcagaggacaagtcaaaagttgaagactcttttagaagatcaaatcaagatccgataggctcttttagaaacttggatttcctctttgctgtatccctcccaggtcaaatcatgattatcaccgcctgcactgggatctcttggaggttaattagttatctgtattgcagctccagtcttttattgaatagttttctctccttatctttggcatactacatgaaattttaactaggctttttagggatttagaattttttccctgtgaaaacttaattttgaatggtgtctttgtgatattattcttggataaactaacactaaaactgtgctttcaaaaaacaaagcttttctcaattattattgtctcatatgtcccacaatggccagccagcttttcattaccatccagtgaactctgttctgttgatcagagtgaaatcaaataactgaggaagtacggcatagcagttaggcactcaggcatggattcagaaatacgtggaattcagtagggctctggcacctactaacaatttggttactctccctggctttcagatttgcacccgttaaatgacaacaatacctactgtgaggtgttgtgaagagtttatgggacaatgtatgaaaagcacgtagcttactaagtgttcagtaactgcagtgtgtgtgtatgtatctcaggcagagaaaaccacgcaaataacagaaagcacctgaactaaaaaaagttttcaatcaacctaacttgtcaatttcagattctgtttcctgtccataatattgctagaaattatcaaagcaaggtagatttttaaataataatgtattctgctctctaaaagtcctgtcttatgttaataaaaaaaatgaaagccactaagagactgaaatatttttaaaactacgttttcaatacagacagtagcaattgactcacaacaaaaaagatgtggaattaagcactgtagtacttcctcccacgttcccattaattatgtcattatttttccattggcattcactttcatttctacaatttccataactgtttggtcctaattttaaatgttaatgcattaaaattttacaatcaaaggagtctgttgcctccttttcctccactgtgattggcgcatgcattcttgtatatttcagaatgtctgccctgtatctttcaggcaactcggctgccgtaatgttttgggatgacattttatttctttcaaattctggtaaacactgctctaatatcatctagcattgaatgttaccttggagaagtctgagattatcttttatttatattattttatttatttccggggacttctctttattttttccctagatgctagatattttttactttatcctcaatgctagattacttagtatgcatatgtttcagcacccattattctgaaacaatttttcaaggaatatagagtactttttagatctgcagatgtggtgatttcttaatttcaaggccattcttctgtattatgtacttgaatatttttcactgtatttatttggtgctgaagctctttgtgtcagggatagcatttttttaagttggatttgctctatattaatgattttctccctaattgcttgagtcatgttgtgttgtttttctcggcactgactaacaatatctcaaatctcccctttatgccagtgtttgacttgtcccttgtgcccgtcttttattactggcttccaatttgttagtcctaaaatggtccccacttaggtcttggatccatagtcttacttcttcatctcagtctgaaggtttataacttttctttaagtcttgttttatatttacacccatgttttttgttacataattgtacaggacaaagctctcatggacaatggtcttagaccattttcaccttagcttttcttccagatagggttcttcctttgacatttgaaagcagagtttcttttttatttcttatttattcttttccccccttttctggaatatgtttgtagagctgccatagcactacttttcatcttggtcatgctcgggcagctttttttttttttttttttgagacggagtttcgctctgtcgcccaggctggagtgcagtggcgcgatctccactcactgcaagctccgcctcccgggttcacgccattctcctgcctcagcctcccgtgtagctgggactacaggcacgtgccaccatgcccggctaatttttgtatttttagtagagacggggtttcaccgtgttagccaggatggtctcgatctcctgacctcgtgatccgcccatctcagcctcccaaagtgctaggattacaggcgtgagccaccgcgccactcgggcagctttgttcagaccatctatttgttcagatggtctcttcctgctgcatccaaaagctactcagagatgcaggtgtttgccattctaatccactttgccaaagcctgaggctccaaagtgggggacacatcagctgagcctgtttgaagcacatcttaatgactgggttctgatttatcatttttgttgttgttaaatgctgactccccaaaatctagcatgaactggggagtatttcccccatttcattttggaacactgaagaccacatcagtcagcaggaaaccaaacctctgtcgatgattttcccttcctttttcacatattttacccatcccttatgtcccattgactctaaatggaacttaatgtcttgtgtactgaattgaaagtgaggctctacaaaattaattatcatggcttgattcagtctccaatctctgaaacttagagttttctataaagttttgaaggttgttctgtcttctagtcttcaaaggagtttcagtttgctgcatatccttttcactgtttgaatcagggttctgtctctctctctctctctctatctctatctctccctctctctctctctacctctccatctctctccctctctcactccctccctctctcactctctccctctctctatctctgcctctctctccctctctctccctctctctccctctctccctccctctctctctctctccctccctctctccttctctccctccctctctctctctctctctccctccctctctctccctccctctctctccctctctctctctctctctctctcacacacacacacacacagccatacaatttagaagagcaaacagctggacataaaacctattttggtcttcttaatgaatcagaactcctaccacagagagtgatttctgaatcaaattttatagggaggggttctgtttctcatggtatattacgctcagacaatgcatattagggcagagagagaaaatgagacagcccaaaatcatgaatatccaaagcagcccaactctatctcttcaaggctatgttgaaccaaaacccccttgtgagctgttctgagttgcagatctgtttgcacatgagcttggagcatactgggtaaacaggagtggttggtaaattctatttcacttcaccagtgagctgaaaaagcattgggtaatatgttatgagttgtagatctgtttgattgcattgttgcaaagtgggaattgttttgcaacatagattcttaatcacggaggcatctatgattgaatgcgtcgaaaattggctgaaattgaaagttaactatactgcagacggcttattctggtgtataattgaaaataaattctaataactcttcttgaaagagctgctcagaggaaatttcaagccccctggaaaaaaaaaaaaagtgctttctcaaagagactgtctctctgcataatacagtaatgaaaataaagctctcttctaagcctaaactagcttctccatgacgctaatgcactgaccaaaatatgtcgatgttgaacgcttgcagacttattttgtaatgtgcctcccaagcctttatgctggagaggccttatcatttctctttgaagtaactttaggatgattttatacaaggacaacccactagaaaaaagaaaaaagagtgagcttctttaatcaaacagtctttagtttgaattcttgctccagtctttgtgaactttgtgacttcagcaatatttttgttgttgttgtttctgagcttctgtttctgtctttgtaaaatgggtttaataatataatttaatttcctctgttttgcatacttgtaaatattacaaataatatatttacatgaatagtactttgtatataattggtattcaacaccttgtaggagttagatttggatatgatacgtgtatatatacagaagctgcatattcatttcaatatcattcacatatgcatattcttgcttagatttagtcttgcaacaaataatgaccttttggtcaacaacaagccgcatattccacggtgatttcctaggattataaaagagctgaaaacttgctattgcctagtgctgttgtaaccatcgtaacgtcatagtgcaatgcattacttacgtatttgtcctgatgctactgtaaacatttctccctagagactgactgctacctctaggtgaaaatgagactttttaaaagagtgacaccttctcaagaagagccttaggcaggtccttcaggagggattccagaataaggcattgctatcacaggagatgacatctcctgcgtgttactgcccctgaaaaccttccagtgggatgagacgtggaggaggcagacagtgatattgatgatcctgaccccatgtaggtctcagctaatgtgtgtgtttgtgtcttagtttttaacaaaacagttttaaaagtaaaacacaaagaaaatttaaaaatagaaaaaaacttacagaataaggatataaagaaagataatgtttttgtacaactgtatgacgtgtgtactaagtactaatattactataaaagagtttaaaagtttaaaaaataaaaaagcttgtcaagtaaaaaagttgtaatacaagttgagctaaagttaatttattattgaataaagacttttttattaatttagtgtatttaatttttattaatttagtgtatttattaatttagtgtatcccaagtgtacagtgtttataatgtgtacagtaatgtcctaggccttcatattccctcgcctcttctcactgactcacccagaggaacttccagtcctgcaaactccattcatagtaagtgccctatacaggggcactagtttttcttttatactctatttttactgtacctttcctctgttttgttatatttagatacatgaatatttgccattatgttacaattatctgtagtatttagtaccgtcacatgctgcacaggtctgtggcttaggacccctacgctccacggtctaccatcgaggttcgtgtaagtgctctatgatgttcatacaatggggagatggccataggatgcatttgttagaatgtattctgtggttaagtgacaagaggctgtatttaagcccctaacctcctccatttctgcacgcctatgggcaacaattgagtaggagaatcagaaggagacacagagccccaccacggaggactgaacactccagtctcggatgcagaaaaactagagttccgaatctggctcaaggttaacctctctacggctacattttttccgtctgtacaactgaagtaacagctttatatatagctgtctcttggtatctgcagcagattcgttccaggacccccacaaataccaaaattcaaggctactcaggcccagcgttcctccctgcggaaccctcggaaaccaaatgagctctccctatccacaggcgtggcatcctgaaaacaccttgctttccatccatggttggtcgaatcctgagttcgggagctgtggacacggagggtcaactgaactccagtgcactgcgttgtaacataaaacgatgcagactgcctggcatctgtgaagttcttttgaaacgtgtgcttgcagtcgcccctgcagacgcagcggctgcgctgtttgtgcgctgctccagagcccacggaaggagaatgggcttcagaacgaaacagatctggactcctcccgactcttcctctaacaggctatgaaaccttgagcaagtgactgtatgtctgtgaggccacattcccacgtaaaatagagattataacacctttcagtggaaggaggaagctttattgagatggcgaacaccatgggcactaaccatgttagctttctccttaactcctctccgcttgttgtcagcctagttttgagcagcagtggactttagtgttgcttttttcatggtggcttccgctcaggaatggctagatagattgtcatctttgagatgaggaagaacccagattgcccttaaagctggttctttctgtgtccagagaagtcccctgtttccctcttgtcttctaaatgaaacatctgcttcttagtccaagtcagcagatgccaacctgggtacacaagctgtctactccatttcccggtcagctccaacaatgctgtgctcacttcccttccaaaaataagtccagtgaagtctgcgatgcatagccaggacatccatcctcggctggctatggtgaatgtggcccctgagctcgtcttctccttggaaggccagagtcaccctctgtagagaaagcaactaaatcacaagaaaagagacactccaggtgccagggcagtactctttaaggaatgtttgtgcatattgagggtgatttggaagtgctctgcatacaaccacatcacatctccctcccttgttctcaaactgggttcaaggcccacccacctgtattcgtaggtcttttccagatggcccactgtctagatcatactgcctaggtgtgcactacttttaacacgccaggtgctctctacttgtaataatcctgtctcttctgcttgtgagtgaagcctggcctacccccaaggctgataagtggcaactatatatctgacctcctcataccattattgagggtagtaattatctgctcatctctgctcccgttcctcaccaccaaccgtctttccagttcctgtggtgcccaagccaaaagaacaaaaccacaccaatcttaagtagatattttgcatgaaatttgatctactgaaagccaggctggctcatcaacctggtggtgcacaagagaaggtatctcgcagagatgttacaaggattagacattaattaaagttcttgggataaatgtgctctcaacaatggtagaattttctatttgctttgcagactctgattctagtctcttcctataaatcagtttctctgtggactgatgactaacaaagcaaaatatcctccatagccccatgtcctcagtagccgtatttaaccaggtcacatggctacaccaagcgtaacacaagccttaatgttgtgaccacagttattttaggagctcctttagtttgacaaatcccagttcttctgcagcataaccttttctgggatgaagagcatagtagttaccaatcacaggaaaaatgtaccttattgataaggttaggagcattattttcatataagagagggcagtctatagacagttttttaaatttaagtttaaaaaacttttaaaaacttaatttgaaaacatgctaacaaggaggcagggtgtggtggctcatgtctgtaatcccagcactttgggaggccgagacgggcagatcacctgaggtcaggagttcaagaccagcctggccaacatgctgaaaccctgtctctacaaaaacacaaaaattagccgggcatgatggcgggtgcctgtaatcccagctactggggaggttgaggcagcagaatcgcctgaacccaggaggcggaggttgtggtgagctgagattgcaccattgcattccagcctaggtgacacagcgagactccttcaaaaaaaaaaaaaaaaaaaaaaaaagatgcctaataggtaaatcacataaagaaaacttttctggaattgctctgataaaatgaaatgggctggcttcaagtcataccattatgacatcccatttctacccccttctaaggataacgatagcattctgaaaacctagattttagtcccagactttgccactaaatagccaggaaatcttggacaatctgtttggtctcaggtatttttggtttgttttgtttttttaatttctaaaatagaaacagtatacttctccctgtacaccatatgaaaaaaaaaaagtttaaatttagaataataacaacaacaataatagcttagactcattaagtgcttacaggtattcttctgaaaaactttgtataaataaaccaattcaatcttcacagcaccttcatcggccagctgctactattatactcatttgatatatgagaatactgagacacagagaggtcaagtaacttgcctaaagtcacacagctgttgagtgtcaaagctgagagttcaaacctggccacgtgagctcacactggtacaactatctcatattgcctttgtaacaaataagacagtggtagtcacagcagtgtgtattctagaatgttaagacgtcttttagcatagaaataattgtagacataccatttggaatggaaagtgatactactactttggatctgttttttgtttgtttttctttcggtttggggatttactaagaagttgttgactgtgccttcctctctttgctgatagcatttattttccagagaaaatggcaatttctcagataagaatttgatagttgaaatggaagtgccactttcaataaagaaatcttagaaaactaaaaaaattacacgtgctgtctttgatatcacaccacagacatcctacctcgtaggtcagatatagttctgcatagttgggaactgcaagacctaactattttctgtttaactaaggggtagaagaatctctttctgaagcacaaccgttgcctctgccccaccatgcaaagacctctcgggccctgtcttgggagaggctggtaacctttcaaaaagtgagtggccctggcccggcgcggtggctcacgcctgtaatcccagcactttgggaggccgaggcaggcagatcacaaggtcaggagttcgagaccagcctggccaacatggtgaaaccccatctttactaaaaatacaaaaattagccgggtgtggtggcgggcgcctgtagtcccagctacttgagaggctgaggcaggagaatcacttgaacccgggaggcggaggttgcagtgagccaagatcacaccactgcactccagcctgggtgacagagcgagactccgtgtcaaaaaataaaaataaaaataaataataaaataaaaataaataaataaaaaaaaagtgaatggcccaatttctcttctggttctattgagctaggaagacatgggggcgtccatcccggaggaggatggtggcagagaagctccaattctgagaacgtctttttgttttctttcttctgtgatcttgtgctggttctgtaacctccttgcagctgggaagaatataatcttcaaagggtttccttaagcctaagcaaaggatgagaccaaaccggaggaaacagtacttcctgatgctggaaggataaatatgtgcaacctgttcttatgagaataagacaaagactaagagcaaaaatgggttcaataaaggttgagatgcatatatcctgaaaaagattattcacaaaggaagacgcagcctttgttcgttcttacctgtggaaagtaaagcccagggaggactcattcctcccgtcagaggcttcctgcaggctctcatcagccgtattttggtgttgcctgaaccatgagattgacctaatttgccatctttttttcttgctaatgaggctggctctaccctactgcttagagaaagatcttgtgttactttcctagtgaaatgtgagacttcgagtccagaggccacacttgcaggatgtctcactccacaggtgatttcaattaagtgctgtgcctgctaagccagtcacctcacccttcttaatatgggaattacccatgaagggtttaaaaaacctgtagatgtccttgtcccacccactctaaaactactgaagcagaatctcaaggagggacctaaacattaaaattgtttaaaatcttcctaggccatttgggataagaatgactgtatctggcgcacagtgtctccacatcaataactaaaggcaactgatctctgtcttttctttgctcaccaggctacagaattaagcaagttactcgtattttccagacaggaatatcagcactctatatttgctgtcagtaccaatacaaagggaatcatagggatgacattgctcaagagacccgaaattggtctacacaagcaaccgcatattcttaggagcagtctctctgtgctcatttgctacttgaggacaattaatggctgtcgacactgacactggttcctaatccctctggtcagacttgcattctttacccaggtcaatgtgataatgacaacgatcatgttttccttgttcactacactgaggagttctgtaaaatggcagcatgactttgaatgggaagtcggagttttacttgatattctgctgctgtgatcttagaaagccactaatgttgctcagccttagttttcattgttttgttttctcattgataaaaagaggggagttagactacattggtggttttcaaaatctgtttcacattggaacactttaaaatagaccagactgaagggatcgtctctggttgcagcagatcttaggtggtagagctgcgacctacctctacgaagcctctctgagacctccatggatccctggtctggtgaggtcaaatgaagagaaagtctgaaggtcattcactgatacctgtctggggttttgaactgtcagcctgcctgccatttccaagggggggaagctatgggttgccaacctcttttctttgagaggaaaagactagataattggcagtggccacaaaaggtgcactacttgcaaattaattcagtggataactgagtttctttaaagctctaatagtctagattttttttttttttttttgatggagtctccctctgttcccaggctggagtgcagtagcatgatctcggctcactgcaacctccaactcccgggttcaagtgattctcctgcttcagcctccccagtagctgggactacgggcacatgccaccacgctcagttaatttttgtatttttagtagagatggggtttcaccatgttggcgaggatggtctcgatctcctgacctcatgatccacctgccttggcctccctaagtgctaggattacaggcatgagccactgtgcccggccccaatattctagattttaagacatccaatctttaaaatgactctttagtgaagaggagaacaaaaggagatactcactaaaattctggtattgtttaggagggccatttcctgacacacggcagccacttggagcagttggtcaggctggataaacagtgctaagcaggcaacatggagcctcacagacatgaaggtgtgggaagcaagctctagcttgtgaagaccaccaggaacctgactcccaggcatcctccacacattagagagccaaagcagtgtgaagttgagtcagtacttcattctggaaactggagagagatccagatagttgcttgtcaaaagaataacaatttggggaagtgggagaagcaactttgaaacagatgaaacaatataaaactccaataaactcaggtatcactctggaattaatggaggacaaattggatttgctgttaagttaaacacccatctgctcacatccctggagcccataaatttgtggggctgattagttgttgccatccttagagcagcagggggctaaccacgttccctggagttttgctacagacatggcccattccctgatgcctgtccagacacccaagctacaggggaaggaaaagaaatggagttgacccaacctggggtcatccaaaaagtttggaggacatagtgacacctcatcttgacctttctgaaagatggtgttgaggaatctccaaaccaatttaaatttcacccactatttttttcattactacaacaaacattgctttttctcatctatccaattatcgtcctgtcttttcctcagtccccctctgctacctgacttgactcctctaacagcaattctctctgtacccaaaacgtgaagccttaatataggctcttcagcataatcgcttcttaattaagtcaggctgtggctccgtttcccagaatcgtttccagagggcttaattttacttctgctcagaattaatattttacattctacacttaaaggaaaaagaatgaaaaaaaaaaaaaactcagaaggggggaatgagaaaatggttgaggggaaaagagagatcatatttcaattcctattacagaagcatccgagcccctgtcgttattttcagcaagtaacactcaatttgtgacattcactttagcaaaacaaagcatggatcaaggtaattaaatggcacagctcagagtgagttaagggatgattctatcaacaggagactcctgctgatatgacactttccatgtgcctgctttgttctggccgtgccagtcgtggcccagagggctgcaggaagcctgctgacggttccagcacatggtgtacccgggtgtgcgcggagcggcccagcatgagcactgtgtactcgtcatgtcagtagaagacccaggggatgaaggctgttagtgacattaaggccccttcctcaagagctggccaactcttgtcctttgccctggatcagtagtccctagggctctactcaactctctctctctctctcgtgtcgcacagaagcttatggatacatttatcctgagattgcagtgagcctaatcatctagaggggagtgcaggacccctagtcctactgaaccaccctgtctatcatccattcaactgtttaaaaaatacgcattgacttcctactatgtgctgtctggttgctggagctacaataacacagtgcagaaacgtgtgctgccattaccgagcctgcagatctgtgggtcacagaatacagggccaggctgagagttcacttggacaaactcagtactgtgagagagttgtaaaagaagactgagaggtctccagacctgagaccagaggtgtgtcctgagggtacacactaccacaacatgggttctgctttggattttggcaatatgggcataatcatgtatgcacagacattctgaacttctttgatcatcattcattataagacgacttctgcagaatctcccaggagaatacagagtggtgtcaggggaatggattcagaggccatggagctggaactctggtggtatggcttcggctgaatgtgcaggaggttgcatgcgacctccccaagagattccttcccttcatcttcagcttcccttcctctctgcctcctagctgagactgatactgtcattaggggaggagcaaagagccaagggaggttgaagatgctcagagggacccattagactgagtatctatttacctactcatgtggaatacatgaatatatgtgattatacctaaataggtgatcatacctgaacttctcgctccagtggctgtggtgggatgttgacaagctgcattctaggacctgtgactggggctgccccagggagtttcccattctgttcttttgattattagccagatagtcccatcagtccagtctcatggccagcaaaccgtaccaacgaagggggactcctactacttagcctgctcttgctgagggactgcccaaattcattactcgccacagaagtttattttctaaacaccacataagataacaatgcggtataccagcaggaattgagaaatcctttcatatttggattttcttcatcatggtatataactcttagaaacatacttatgataaggggcttaggttgtagaatttctcaatttccttccctaaatattttatcaacatgatggatttttcttaagaagattgaaagatacattttttttttcctttggccaatttgggtaagaagggaatttagttttgttttgttttgttttgttttcctaaaaaaagaatttaggatgctggcagtgagcccatgtatgttcaggtgttttataatgggaattagaacctcttcatttatctcattttgttacacttgctaccaaactccatcaagtgctccttcgacaacaggcaggctcacagcattgccaagcgtgtactctgtcaagcttctctgggtccacgtttggggatccttgtaccctgtgtccacataaaaatgtaccacagattgagccctgaccagactctaggccctattttaagtgcattatttatagtaagtatacctcacaataatcacatgaggtcaataatattattaaccatttcatagctggaaaattgaggcatagagaagtaaagtaaccaccccaaggtgataagaaagcagcagggtttagttttaatgacaaggccctgcacttgaaaatcgtatgaggctgctgctttgtgaggccttcccagtaagaggggtctcctttctcctcgccgtgcgtttgctcttcccagcctttctgcaatgctcccagtcctcctgagtcagacaccagtggctggagagcaagcagaggcagcagacgtgctggggaaaggagtgaaagggcattgcctttcagtcacgtcagacaccttcagacctacatgctaaatagggaaaggagttctgggtattaaaccaaaccacaggaaatctattctttcccctcaagtgaaatcttactcttttacagacactagttttaaaaattcacctcttctatgaagccttcatctaaatatgtactttggcattcttctagttcttacgcctttatgtccatttttttttacttattagtacattgtatcttttaaaatatgtgtgtatatatgttttttgttttctccatttgattggaagttctccttcggagtgtcaaatgttctgcctttcatacttctttcaatgggatcttggataggtctgtggacatggggttatatggagcatatggaatggatgcacagctaatgttggggttgaatcaagatcctaacatcactctataccattagaaacgttcatgacgtttggcttttgcaaagtgagataccaaggctttgcgtctaaccaagaatctaaagtatgaaacctaatatcaaccttagctatagacatgtcagtacggagcacaggtgtgaaagatttagaagctgcatgtatgtgcatggttagcacagagatattgataagaggataagcccacttcctgggcaggcttcaagggcaaatacgcaattgatcatctaagacggggtcagcaaactgtgcccatgggcccgatctaacccattgcttcttttcataaataaagtgtcataaaaacacagccacactcattctttctcatatggtctgtggttgctatcatgagacaacagcagagctgaatagttgaatcagagaatagagggcctgctagcctgaagatctactacctggcccttttctctatttctatttttgatgcgtataaagaaaaaagtggatcctttcttctaaactcacaaagaaaaaaaattctacaagtccagctttcttccccaggccctaacccatttcttttctcttctactagtatcagtttgaaaaggagatcccctgaacttctgtttctgcaagtcaattatttctttagaatattcagtgccatggtctatttatatgcagattttagatgaagttccagattttttattgtgctctacctttttagaggacattttagcatacgtggtactaaaattttttgtgtattgtctcacacttagaatcgttttttttcaaatcttgcaatttagccaggaacttctagggagatgtaataaccgtcagatacctccaacagaaacgtatagtggggaactgagaaaaacatgaactctaaagggggtttcaatctcagccttatcaacatttggagttttgttccgattttaacctactattcccagtgagacatatttcccagttttcagtattgatttttatattatagaagacatacaaggacgtgctcactatttctcggccacattcacactataaagtgcttgctaaagagcatgtaaagctctaggtccagaattaaatgtggacagaacacgcaaaaggggagattaaaataatgcactgccttgcagggctcccaggccttcggctgtgtgtgaaaagtttactcttcgtaccctggctgtgccacctgataactcggggtgaactcatcttaaatcccacacgttttctcagtgggattatatcccccaccaactttccttaactaaaggtcaaggggatcgtggagaggggtccagaaatagcaaggcaagtcctggagactcagaagcatttgatgcagggaaaatatgaaccctgagcaaagaaagaaattcagggcttacttcagacttgaaagtcgcaccatcaaggatttttgtagctgcgcggatggacatcaataggtgattaaagagtgccaggcatggaacagtgcatctctaaccttcggggatggcttcgcaatgggcagccctacactgcctgtgggctactctgtaaaatattgtggagggaggtcatctggggagtcccttagcaaacaaggggaccctgaagaagggcaagtgatgagaaaaacttgggggtgtgtgatctgacatacaatcagctgcacagcctgccaggtaatttttatattttatctcatttgattcttgccaaagttgtgaattctataaatcatgtccatttaataaacgagagaattaagccttagcagagttaaacaatttttccaaaattatatgatttgtaaatgatggaactggggtataaattcatatgtgatttttatattataccatgctgggtcaaaatattactgccccaggatttttcagggacccaaaacagaagaaaaagttaatgtatgtgtactttatagatatgttttatttaactatccagaaaggatagtctttttgttaacttttgttttgggttaaggggtacatgtgcaggtttgttaataggtaaactcgtgtcatgggggtttgttggacagattattttgttacctaggtgacaaagcctagtacccaatagttattttcttctgctcctctttctcctctcaccctctatctcctgataggtcccagtgtctgtggttcccttctttgtgtccatgtgttctcatcacttagctcccacttataagtgagagcatgtggtatttggctgtctgttcctgcattagtttgctaagggtgatggcctccagctccatccatgttgccgcaaaggatgggattttgttcttttttatggctgcatagtgttccattgtgtggatgtaccatgttttctttatccagtccaccattgattccatgtctttgctattgtgagtcatgctggagtgaacatgcatgtgaatatgtctttatgatagaatgatttatattcctctgggtatgtatatatacccaacagtgggtttgctgggtcaaatggtagttttgttttcagctctttgaggaatcaccacactgtttttcacaatgtttgaactaatttacactcccaccaatagtgtataagtgttccattttctccccaacctcaccagcatttattttttgaattttaatagtagccattctgactggaatgagatggtatctcattgtgctttagaaaagatgatttcaattcttaatttaggtaatttcctttaggcatatattgtgtcctgcgacaagtacagcttcagacctagtttcttttgataacatatattcttacaaaccccatttctttgtaataccaacatgcctttattattcatactatgaaaaaagaggcagtaacagtgagtagatggtgggatgtaaactatcgtcacactcttgtttcctcactatacttactaaagggtgggaagatatagaatctatcatatattgcatatttctctgggaggcctttttaaggaatattcaggaactacttttggtggcacatccagaaagaagacatagaagaataaaaaccacccagggttacatgaattcaaaggtaaagtaaggacttgacaaagagcaaagcatgagcctgagaaaaaagcaggccccctgaggtccgctgatgttgtgcccgtgttttccctctcatcgagcactatgacaggtgcacgggggaaggttggtcactcgaacaactacgtttgttcagataatcactggcactcaagccataacattgtagtggaagatggcaagctcagatcaagtgacacctttccccagatcctaagcaataatgatagtaattgaaacactgtgcgtggcacccatgaatggtaaacaggggatttacttacatcaattaaatctaaaagttattgctgtgataatcatatccaagtaaagggtagaaagggcaccatggtgcgtccagaaacagaatgcagtgtctgtttatgcatatcggggagggagtatgggaataagtattgaacgggataaaaagtggtctgaacgttcccaaggcctttccatcacctggagagagctccattattcataatcctaaaatgcatgggctgataattgccttaatcaccagagaaacatggctgagatgtactgaaataagccataaaactcattacaagataacaagattctatctattctccgaggtcacactagagttccataaggtcaaggagttaatcgcctcgttcagcagaaacaccgtagatagtaaactctgtatgtgtgtgtttgggtggggggaggcggtgcatgtagtttaagcctttctaggttctcagccaatacacatggtgaccagataggtgaaagggaagtggatgatagtccatgaataaccaataattttgtgctttttttcttcttaacttttggggtgaacacttcttgtatgctagtaattgttaaataggcttgttttgcaaagttagcatttcccagactgacccccttcccaccttacgatctattcaattctaatgacctgcccataggtcaacagtggtgccagggcagttgctctagactttgagcagacacgcttctttcccgtttatctgatgaagcacaccacagacagttacacaggaaggaagcaggaagcttaggcatcacccttctcactgcctctggtttctggaggagggaacaaggcccagggaggtgtaatgctgtctaacaccacacagactattcatggtatagcaggaccgtgaggcagtcccaggtaccatttcactaagacaccatgttctctgataggcaacgctgcaagcaaatgttctttcttgaagatgaaatctctggattccccagtgattctaaaagcaatgccctcctaaatttggggggtacatcctcacaggtgtgctagtcaagaggtgtggacttagagtaacattggttcactgtggcgaggggccattgcttctcctacattactgacctcattggatgatgttggtctgcatttgtcttctcttctctgccagacctctgctccaacatggctcctcattctttgccagagcttttgaaagttcggtccagccttcagattttgacttccctggtttctcagtaaagactattttactatgaaaaacagtaaaaataacaagactgctgagaagatgtttgtgaagataaaatgagattatgtgcctggctcacagaaagttctcaataaacagccatcatcatcatcaccatcatcatctatgtaagaagggctctgttgagggatataggaacagtaatttactatttcccattattactatgccctccccagaggaaatgagcttaaactacatcagaaaaaaaaataccaaatttaaaaaaattactgggaaattctgttatataatttcaagaaaatatcgagaaatctcttggcctccttcttcttcaggggttggtaaatgagtcattgtttggagactgggtgactccagtgctagctccacatgttttctaggcatttagatactattaatcttcaataagttacatataaatttaatctattgaccaagatttctagttttttgctcagttctttgtttttggtgcatgtggtttacaaatatgtagatacaaaagaccaagaatgctgtcatttttagttgagtgaacaacaaaccttagatcctgacttttgcaactaccgactgttctcaaaagtatttttttaagtttgcttcataaaaacaatttaaattaagctcctcaaatatgcatttgttgaggatttactttgacagatactgtgtaggtggttattgcagaattaatcctcagtaaatgtttttaataatcatttgattttcatttaacacacagtaagcaccacataaattctagttgtgtatagctagtcaaaaaacaagttgaataaataccaaccagttattaaaaacatttatggagaattagctactcattgttatctgcattcaaatcaattgcacatcttccatagtaaactttaagcaagattccctggcagatgctgtggaataaagctcattcaccagcactggtaggattcttggtcatacattcagctcgggactagtgcatttaaatctttgtctcctaggctggggataaaaagatcataaaggccgggcacagtgtctcacgcctgtaatcccagcattttgagagaccgaggcaggtggatcatgaggtcaagagatagagaccatcctggcgaacatggtgaaaccctgttttttactaaaaatacaaaaattagctgggcatggtggcccactcctgtactcccagctacttgggaggctgaggcaggagaatcgcttgaacgcaggaggcggaggctgcagtgagctgagatcacgccactacgctacagtctggaaacaatgtgagactccgtccccgcccccccgacccaaaaaaagaaaaaaaaaaatatcataaaaagcaaaatggattccactccgggggaagcttaggtcagctcatccgctgtgctgttctgaggtcagggaacagatagatacaggcccaaacagcctgaggtggcccccagcagagctgctctttgtcctggaagcagacactctcccatcagagaatgcttagaatacagacacaggattgggagcatgtcactcgagttctagacttatgagttaacttgtgaccttaagaaaatgacagccttcccaatatccatgtcctcttgtgtaaaatggaaatgtaaaagaagattggccccataaggcttctgtgaggatcaaagagcctaagaatggaggtaaatggctatacacatggagcagcacctgaatagagacatgatcattgtgttttttttctatgagaaaaggcttgagataacactcacagttcctgatgaggcttccttggcaaccagatatatttactgggaaaatcgatgtactcagatttccagtggccacaaaccagaacaaagcaaggtggtgccccaggccttgttcccttggcctggggcccagacccaaggtcatgcacagctgacagaagaacgagaggcttcagggacccaggctcatctcctgacatgctcaactcactctcacagttgatgtttttggaagtttgctgctcagcactgttgtcaaatacttagcagcccaacttggggcaagacagcagctggctcaccctacctgtggacagaggcagagcgggttctggagtgggcagggggatttgtcagcatctggattgtgactggtccagcatgccctcccctgcctgttgggcagcgggacttagacctgctttctcaatgaaaacaagcaaaccaatgagaatagacacaataggattgctccacgctgcagcagggcaggaatctgagcaagtcggggcactccagaccctccgatcaggaagtacgccctggcacaggtggccatgggtggcggtcactccgccttcagaaagccacttggaatgcaacctgcacaattgccttcatcctttaccgccctgccagattgttgacggaagcaaccttattaccagtctccaaaacatctccataaaacccaccgatcacagactgtagcatgattacagccaccccgctatttgacgagctgctgcaatttctcccagggactggatgatgcaggcttccttcaccaggttcccatgggtgtgccctgtgtggaccacagagccagctccagaaaggagaaggcaggaaagaagagacttcggtccctgctttgtagtcttcctttcttagggaccttttttttgaggttatcttttttttttcttcctttgttctttcagtctcacatgtctccctccacctgctgtctctcttagccttcagaaacagatgtggcccactggaaagacaacctcacagtcttccttgcttccaggggaggacggacatcagccggagggccctgggggaggggaaggctcaggcctcgctgcctgcagctgcggaagaaatctctgatgaatttcaaaacctgcctttgctttggatgtgatcaacagtcacagtggggcctctgtgttttactatatgaacaagctcagagggagggagaaatgcagccccctggctctgcctctcccctgccacagtggctgagtggagggcaatcctcatctgtgcaaactgtgagatgtttagcaggatgcaaagctggagccagcttgctgctcctacccgagtgcctggagctgagagtgtagggcacccctgcgtgtggggtcctggtggagcttccagtatgagaacacaggtggggaccacaccaaagcaccccctcagagggctccccccgcggcctcttttctaggctgtcctttggaggagtggctttcggaatgaccaggatacattggtgataattgggctggaaattatataatttcatgcaagtaaaattcctgtctcaggttgttacagcctccagccttatcaggaaggtgggcaggtgctcattgaaggtgtttgctcaatatttgtcgattaagctcaacaataccttcttctccatcagcaacaatgtgactgtctcttggcttccctgcccgtcagatggagagttcattcattgattaattcaacagacagctctcatgtgtacaggactgtaaccggtgatggtgggagaagacaaccttgttcctgtcctcaggaggaggtttggtgggatcgtggggttcatttttaaaggcataaagtcagaatcctctgtcagcaggagaggcaggaagaaaggaggtcgtctgccttttctttcagtggttgaagcccctttcacctaaggcttcctttccaggcgcagccctagaatgtcaaggaaaagccatgtgacccatccacccccaccgccaaaggcagggccggtgtccttctgtgtgtcccagggaagcctgggaggaggtgaggggacctcacggccacaagaaccgcagttgtattgaaaagcaactcgtccagtcccgacaggttttttttttccgggagtctcagggttccatctaatgcagagcttctcagagtccggtctctgccaatagcagtgtcatcacccagtcatatagttgggtgtttgtcccttccaaatctcatgctgaaatgtgacccccaaggttggaggtgaggcctggtgggaggtgttgggtaatgggagcggattcttcgtgagtggcttgatggggtcctggcagtaatgagtgagttctggctctgttagttcgcctgagatctggttgttaaaaagggcctggcacctcccacgcttgctcttgttccctctctcaccatgtgacacacccactccccttgccttttgccatgagtggaagctccctgaggcctcaccagaagctggcattggagccacgctacttatacagcctgcagaactgtgagccaaatacacctcttttctttataaattacccagtctcaagtattcttttatagcaatgcaaaatggattaatccacccagctactcagaaatgaaaaatctcaggccacatgcacatgtactcaatcggaaatgctgggcctggggctcgcacctgtgttttaccaaccccgcccccgccactccgccggtcctcgggcacgctgtagcacactgcttcccacatttggctgcatgttggaatcactcagagagtttttagaaacaggagtgcagggtcccattctcaaggattctgaggtgatggggttgggatacgacttgagtatgcgggtttttcaagtcttctgaagtcattcttgtgtgcagacaaagttgagaactactggcttagtatctgagagcttagctgttaagaaaacagaggctcccatccttaccctacaccagagctatcctttgtgttttctggaattcttagcaatttccagacacttgctccatcatccgggagaagatgctaattagtagcatttaatctggtaccttcctccttcctttttggcaacacctcagagaaaaacaggaaacctgaaaaaaggcaaggtcagcaacaacctccagggcttccagaaacacagagaagtctctggctcggttgtttctgtgcagggggctgctctcagctgctttgctgtaaaagacacgtatgggaggctgtgggcttggcctgctggtgagctgggaccacagcccctgccgggtccattccccactcagaagtggtggagaaaggacggtggactggcagggaggacaattgagatcccctagatgtttagcacattgttcgatctgactgtggaaattaataaatatgctcactggaatgaaaagaaacatctcctacccagccaagctctgtgtgaggcaatgaagggaaagtaaaagtgctgctcagagaaattctagtctccactggaagacccagagcagcatagaagcagtgcctttctgaagtgctgggaccaaatcgattggccatctgggcacctgccctatcccaccattgaacctgtgccctaggtcctgggaggacctcctccctcagcctgggaaggaatgggagggcagatgagggacagcctagaccagtggtcagttccccctgcttttccttcatttccctcaaatccaccagatcctcatctgccattttcctgggcctcagtactcccaccagcaaagtgttagtgccagacctcacgctctagggcatagaggagacatgggtaggtaaagggagaaggctttgcattccagtagtgttttatgcaaggaaagaaaagacctcaggaaaaaaagtgtaagagattcgtctccataccaccaccatcccagttacgggggtggctggagaaaagattttaaatccacccacacagtcctttaaaaagacttgcctaaaaatactgcacctctagatgaccccacttcatttccccacctaaaaagacacagaagcaactctcgctttcttttccttcctgcgatgcagcatgggctgtgaggaggcacttctgaatccagtgaataactgcaggcattgggaaccatcctcccaaccacatggatagacttgggacttgacataggtccttgagagatgctaaggagaaggagttggaggcttggctacctgtagcctgtgtcacagatatactgctgcaggtcacaggaggcagagctcctgctgatgggttttccggttctggtttggacaaaggaggagggcggggcataagagctggggaggaggaggaaggggcactacctcgttctgcccctgcgcgctgagctctggctttttcaccctgtttttcttttcttggaggcccagaagtcttcagagagggtgtttgagacagagctagtctaggtccaagtttggagtaggtatgcaactgtcactataaacacttcccaagaagatgacctacttctgcagaaagcacttgaattgcacgtggaatctgctctttttaagtttgaccgagtcatctgtgctccgtgagccaccgtggtggtctggcgctgttgctcagctctcggaggctgaggagtgtccctggctctggaactgagggggttaaccaagtgcttctctgcattgttagcggggaggaaggcgggcctggagaaggtcaagcccttcagatgaaaccctctttgagcagttgagctgtttccacttgtggttttacaatggccctatgaagaccagcccaaaaaaaaaaaaatcatcgaaatgggtcaggtgaggggacccttgagtggaggcccagcatcaagcgctggcccagtctgagagttagctgctgtctagggttctgagccctttggagaggaaagcatctgaggccagccttcgatttgggaaaggtcagtggggaattccatggcagaagaactatgccgtgcaggaagggagaaaaacaagtcaagctttccctggcgtggaagaataaagggcagagggtggaccagtgtttttaatgccacatgtcagcaggtagctgctcgcaaagggccagcctcttcttcgaagtttttgttgatggtctccaccaattccagtttgtttttcctttgtattgttattagcaccaaaatagaagacacttctccactgtctcctcagaacaccccatgcctacctctgtcttgtcaataggatgctatattacagctcagcacctacttatctgtgtgccttgccaggatataagaaggcaggcatcatatctcttatcgctggaatcccagcactatctcagcatatcacagtagtgtgtatagacccacaatcttttatctgcaaattccacattcacaaaggtctggaaacctcgagctttcttacaactcattttgcagaaaaccctgggctagatgttgtcagggttgcaaagtcaaaatgtaggagcagagtggaaacagcagactcaaatacatggcaaaacagaacagaaccacagggcaaggcaggcagcaagctgttgagtatgaggggaagagtgagatgtgagtgacacattctgaagtgagctctgaagagacctgaggggccaggtggcacttaagctgggtttcaattgtagataaggtttgcaaagataaaggggtggggtggggagataatcgtgggacaacatggttttctatttccctaactttttatgggcatattgctctctttccattaagttttcagtctctcccagggctaggatcttagttccatttcttccattctgtccaccgtacacagaaaatgcagtcatctctcagaattctcctattcaataagaaattattctgggacttacacatagaatgtgcttgagaagattttcttgaatgaataagaacttaagggcctgtaatttgttttcattcataaactttatttttggagcagttttaggttccagtaaaataaggggaaaatacagagcattcccatagaccccttttcccactgccccagcctccccaactgttaacattccacacccacgtggtgcagctcttacattcgtgaacctacatggacacgtcactatgctgatgcccgtttgtcctcgcattctctcttattcaagagtaatagaggatgcagacgaggacggcatgccttgctctgattcagcgacctctctttcctcccccgacttagaggttcctggtctgcggagaaacttgcccagatgcaaagccacagagcagagacagcagaatcagaagctttaaaaggtgtaagcggccggacgcggtggctcacgcctgtaattccagcactttgggaggccgaggtgggcggatcaccagaggtcaggagttagagaacagcctggacagcatggcaaaaccctgtctctaataaaaatacaaaaaattagctgggcatggtggcaggcacctgtaatcccagcttctcgggaggctgaggcacgagaatcgcttgaaccagggcatcagaggttggcagtgagctgatatcgcgccactgctctccagcctgggtgacagagcgagactccaaaaagaaaaaaacaaatagatgtaagcactgagaaggcagagagagcatccctgtgcaatagaggaagacatgtaggtatagatactaaagatagaaaagacctctggtatcagttccctccctcagggtccagagcaggggaaatattcaaggaactgctgcctctgatgtctcattggcagaccacagtcaaaaccacacatttttcaccagctcccagggcagctgaggccaagtgatctcttctcccatgagtgtggcctcaagaacagaggtactgacaccacagacccttaaagtgttgtgctctttacagtttgcaaagcacatttaaagtattgttgcagcctgaccacatcctagtgtgcagggtgcttcggggtcctcctgtctcacaggtgagagagctgcagggagcaaggggatggccctccatcacactgggtgagggagttgagccagaccctgtatgctgagccctcagcccaagctttctatagggcatggtggccgggccatcgacttcaaggtcctctggccactgcttgtgataataccaactcaattgtatttagttttacattcataatgagagaaaaagtagtcatccttctgaagtacggtgttttagtttatatatagcaagaaacatttctgagtcaaataccgttaggaaaagtttcagcatagatctttacctcgaaccctctccaagtctttaacataccaatgtgatcgggatgcaatatttgaccgtaattccatttctggcagagcatcttggttggaaatctctttgggggatgcagcaacagaatcgggggacacgtggctgcttttctctccagggcttagctctgagctgtcctccacggagggtctcagaggagcttggaggaggaaagatggaaaactgaaacctttaagaagagtctaaaaggaaatgagttattcaggcataagaagaagaagacactggcaggaccctgaagccaattttccaatatgtgagcacgtgaaggatccgctacatagcgtggtgggtgaggggctgttcttgcaagtagaatgctcagagcctggcttccttacagccgacagaaccgaatcagtcggccacaaggagcttgttgcatgaagacagggagcctctgcggccaggagccgggcaaggcggggactcagtatctcagggttctcaaagtgtcccgtaggactcgggtgggccagtttgcatcatgtattgaggcaggggactgaacacaatgacccattcaggtggttgttggcctcagggtgctgcaataatgaggttttctgtagaagcaggtctgaaagacagatgctgcaggatgaagagggggatggagaccttgggtgaattcattcacacccaaaccaggagggcggagggggtgagggtgagggagggagagaggaggaagactcagagcagagtcatttgaaagagcccagaagccaccaggtggaaaatcaccctgcagggagctgaccttcctccctcctcccgagaggcaccagccggcactgaccctgggtcccatctctgtggcctgtgagaaaagaggtgaaaagcggctcctcatgcctcgaaaccttgctgcccacatctgagggctggccttgatctctgggtctgtgcacccctccccccttattccttcctgacctttcatccatgaagcggggacagagggtgtggggctagggtggtgaagagggacggaggaggcaaagaaacaaaaggaaaatcacgaagggagactgggccctggggataggctacttgcgaactcctgagtttcattaaatatagaaaggtaggatgaaaaaataatattcactcattgttacagtttcaaagtcggaagctggccttgatttcaaagaacttgtgtgtaatgtgatgcatggctttctcttctgtctctttttataggtaagtgacatttcattctgctcatccccaaggcaaagttggatgtttttaaagtggaaaaaaaaatgaacggaaaaagaaacggggaaggtgggaagaggtggaaatggaagggcacaggtaggtgcatactcaattcttcatcttttgcacagactggtgggggggtcttccccctagattcggtggagattcctttcctcaggacggaaggtccaggtggtgactgtggcttttgagatgatgatggctttgttctttgaaaggggtttgtcctgtgacacaatggccagcacttttgctagaggtctttcctgggtgaagttccaagtcagaaaggatttgaggttttgcacgctaatgctatgtgtcagctacattgctgtgagtagggcctagaagaagtagggaaaagtgttctggagaggcaggattaaaacattccaggaaggaaaatcaagaacaaggaagaacgtcattcctgacatgatcaggcagtaaatggcatggaaatttctggacagaaaggaggtttgtgggaaaactgagatcttgtatattaagaaatttttacttaattttaaggtctatccaactactgtcaatgtatttttctattcctgcctggtcgccgaggctgaaacatcacttactttctctttagcatgaggcagggtagatttctaaaagagctgggggctggtttgtcattgtagtcactgtaccttttcttggtcagtcaagaaaggcgttttgaagttccaggctagttttggctttctactgctcttaaatataattgctttcccctaagagtagagtgaaaatgctcttttttttccccctgtgagttgccaacaatccactgatataattgactgatggctctgtcccacacgtatttgttattttctttgcgagagagagaaacgtaaaacattctatttaacagtctataaatccagactggaaacataaaactcaattcaataaaaatattgaacatactcagtcttatcttaagtccaattaaaggagattaacagaatgaagtgggggctgggttaacagaaaggggaaaaagacaaaaaccatttcaacttcaacactatgtctaaggtctcagaggaaatgctctcacaaacacgagagaaatctataggcttcggaaatctttgaaagagacaaaaatactagaacttgtttttgaaagtgtataattctatttctatcatttgaatacacagatgttctttaaatcttctttctcttgcttttaacaaagagggaggataaaagaaaactcaaaacccagcttccccctctaaattaggaaaagtgtcaccatatgttgaaaatcacaaagcatcttttttcatgatgccatgtccccgtcctgtggtctttcatttcctccgaagacactgtgactcatgtcacattttcacggctgcagacacacctgggaattcttcttggtatttgtcctgcataatggggaaaattaagctgccacgtatctggctcctagcccgagcaagggctttacaccacccccaccctgctttgaaagggaagaaaatctgaaaccaggaagcactcctagaaactgcccaacatggtaataagaaggtgggttctcagccacgtggcttcctgcagtccctctgccacagccaaggcctgtggatcaaggttgatggagtcactgatttagcgggaacattcgtgtgtttttgagcgtgttcacagaagaagggctgcaacataatcgcttcttggtcttgaggtcctcccttttctgcatagtgtaggcattgcatggatgaaaagagacggccttccctcctggctccctgtggacctcagaacttgccttgtcagcttggggcggggaacgctgaggggcccagcttattgtgatggatgaaggcagtccctcagaatttcccattaataaggaggtaatagagtatatgttaattttacaagaacatgttccacagagcatataagtacatgggatatatttgaatagttttaatatgctatgattctcagaaccatgggaatgaaattctatttgcacctacctaataaacaacacattccccagcactactgggccctggtggaataagaggacaaaggtgtagtgtttacaggcacccctcccccaacacacaaacactggcacgtgctcacacacacattcatattcctacatgcatactcacagagctgtgattttgcctttgaaaggtgacaaggagcaaagacatttttcagaaccagatctggcctctcagtgttgtttcccaagatatatgtgtcctgtttcatcaccctcatcgctcaccaaacgcctggccccgtcgctgtgtttaacttcacagcttggctgccgaatgcgccaggctcttcatttgcttggaatccatcgatctgaccatctccctagcgccagtgccccaggttggcacgttaatcatcttgggtccagcattgatctctctcactccattcctctctctgcctctggtcctgaggccttccttgaccgctctgtctgtctgcagcacgggccaggccactgagagggtttctgcttctcagctctggttctctagctttgagggagcagcagtgagtgcgagggggactgtgtgcaccgcttctagcagagatggaaacaaagaactctgtggtcttcaacagcaagtcacgcccttggcagccctggcaaagccggctgtgaggaatgctggggttcccactctctctttggacaaggatgtttttgttaccttttttttcttttttagctaaggcttaccaagtgtcagacgtcttactaaacaatacacacacacacacagagatttcttattttcaaagtaattctatgatactggttttatcatcctcttcttacaaacaagaaaatccaggcttaaagcgatgagataatttgcccaaggtcacatgaccttgaagcttgaattagagcttgtgtctatctgactacagtatttgtgcacttaactgctttgggatgaaaattctatcccaaaagagcagaaggtgacaggaaaggaaagtctttggaccaccctgggctcgctcccctctagctgtgcagagcaaccaaattcttgactgctaggcctctctggacagggctccagtgcagccagcacagggaggtgacaaagagctgggcccagatttagaagaacccagtttgaggcctgcatctgttaccaatttgctgtgtgcccttgggcaatttattaagttctctggacctctcaacatgggacagaagcatggtagtgtaatactgcataagcttaaccagagaccaagtacctataaaaggatgctctgacaatatttaataattatcattacttgaaaaatcccctctcatcatagccttccaaatttctgaatctagttcttgatttttctaatgaggtctagaatttttgccaatacaaggaacagtttttggcagctttctgcatcttcacttcctttcaataccaagcctagtggagagcaaaattagcctgccaatcactcagaggcgtatgggccccaggaaattaaattccccctctctccagctgtctatccccagtgccaggtaccaaatgaacacgcgccatacgttgcggttcccgtgtcttcttcctatatgttaatttgataattttagtaaaataaaccaagtagatttgagatgtagttcattatccccaaagtcaagagattatagaatgccgtgagtcagaagggggccactgctctcttccattgttttttttttttttttttttttttttagattttaatatttcctttttctggcaacatttaaaagccactcttttacatctgttgccatcctttaatgacagacagaataaagggatgattgttactcagagaagctaaacaaagggactaggatcacttggcacatcctcgtgtgtggctgactttgaactcctggagcccatatcctccgcgcttctgctgggcaccagaggcagaacccgcggaactgcttcctgcagccacggatgggtacccaccaagccttagggagaaccgtgctctaaatgccatctgtgtttgccagtggcattcacgcgtcccctcctgtcctgcagggaaattaagaagggatctcctctcaaggctgacacctggagacagcggcttcctcttacacatccttcccacgcctcatctctggagtgagttatcttaatcctgacatttgcccagccattcagaatgtaaacctttttgtactacagggtaacaaatattttgggtaaacagtgattgcattgatgtggaaagccaagtagagatccctggcaagtgaaggataaagagctttgtccatactgtttggtcactgttatgagctgaacagggtctttccaaaatttacatgttgaagtcctgacctccagtaattcagaaggtgactgtattgggagatacttaaagaggtgattagggcaaaaagaggtcatatggctaggaccgaatccaatatgacgaatgtccttatagaaagcgattgggacacagcacacagggaggagagttcatgtgaagacacagagacgcctaagaggaaactgacactgctgacacattgatcttgaacttctaacctgcagagtgtgaggaaataaatttctgttgtctaagctacccagtctatggtattttattatggcagctctagcaaactaacaaagtcacaaaatgcattcatctagactcagtcccaatgtctgggaacaagcagaactggccgtgggccacggaaaagaggcaggcttgtgagacaaattcccaccccaccgtattttgcctgacttttgtcaagttcccatgttgatccccagtttccttatctgtacaatgggtatgatatatatctcattgctgttttgaaaattaactgagataaggaataataaatattttaagacacgcattgctcagtatccagttttgctgactcaatttctcttaatggtcataggaataaaaatacacagtaaatgtgatgttgtaatgtgtggtatatattaggctacatattcactaaagtcactgcatcagtctgttgtatttttttcttctggtaattggagacaacacatctattctgaggattcagtgcccagggctattgaattcctcaacccatggtcaagtgactgagtgaggccagcccttcacccttcaccctgcctatcactcctttgctctcagccttactgctgtgggagaagcagtgccatagaatatggctcatgagatgtccacaccctgcccctggccctgcctcctgtcttataattgccagagggttcctttatttcaatgaaacttacagttacaaacagctacggccagactcatggattcacttctaatgactagcttcactgaggaggagatcattgaccataatataccacaaatgcacaaggcgttgcgagggcaggagaccacctgactgcccccagcctggcctaccccattggagccatgcctacaaccacccctcacagaacagaggatcccagaatgaagagacatactcgacaaacacatgcatttctgacatcctgagatgggagatgcctatgatctctgggcagaggttgactgaaagccaagtagccctggatgacgttcccagagtccccgacccacaacagagtcctcagcctctctggtccacaaatggataagatcagtgcaacagagacgtccagggtcctggtgaaggactcacaaagctgcactcactaaaggctgatgacacactaccattccagtgggatgacttaccagggaggggggcattcttttccagctgtggctgggatcaacatttctggaagctgagctattgatctgtggctgggtgagtaaagatccaggtctcacatctgagcgattcagccccatgcactggggtctggggccgtgcagtgttctctaaggaactgacttggaggcctaggggaccctagcagaaggggagtgctttggctggccctttgctccattgccatggccttggtcctcacaattatgctgcaaggaagtaagtgggtttcagggctggcttattggatcttgccatcccacctctgtgccctacctgggattccttcatttaaaagcttctttttcccttaaagaggaggaccccaattctgggcagaatctacaaagcctgtggatcctggcctctgcttgctctccaactctgctcttccgtgggttgttcttgttccagccacctgggctttgccgtagtccttactccttctgcctagaaagcacttctgatccctctgttactgggtgaccctcagtacctttaataattcaaccgaagacccttccttgggaaagccttcctgatccccaggctgggtgctcacccttgaatccaccctttttcttctatgcatttgttttgctttgtatgtaagcattcattggtgctctgattccagctccccagtaggggagcagccccatgacagcaggtgatacaccttcttttgcccccagtgagcttcccagaacctggaaccatgtgagtactaatcctggtcatggagggacccagagaaagtttcctgccttacagcagtgagcaagtgttcagcctcgtgcttctctcaacaggaatagcccaggagtgaaacgtccctgagcagaccttgagactttgagggcttctcaccctgatctcaccttagaaccacccaggaacttttaaacccatggacgccctccccacatgcctgagattccaactcaaacagcctgggtgggcctgggcatccgcaggtgtctcctctgtgctaccaggattgggacccactgcctggagacaccctctcttcccactgctgggttttgattagttgaactccaagggcacctctcttccaagttaatagtcatagttgccacacactgtgcaatccacttctggtgccttgtgcggcttgagcttcataatgatgagagatagcttttgtcgttcctattttgtggttgagaagctgcagccaggggaggttaagtatcttgaacaaggccttgcaactcacatgagaagaagcaggatttgaactcatgccaatggaacacgagcctgggctgttagtgtctatattatatcaccttacgttcttgtggcagaggactttggaagcactttgtgtcatgcatatatgtgtgcatgtatatctacctctatctatctatctatctatctatctatctatctatctatctgtaaataaatatcttctacagcacttactatcagcaatgcctggatattcctaagtattcccaggtagtactactaattgtgagtggagattttaaaaaaaaaacaaaaaccttgattatatgttacaagtccctaagtggttgggctgtggcccctcacctgcttgtagctttgagtggagaaaggacagcacccgcgtggccaccgaaacaagctctcctggccctttcccctgttggataggaacaaggggcaggatataatgagtctaaagcagagacttaagatgactcctttcttcccccttctaatccccaatttcagacaaacatggggcccagaagtgagtgagggaattaaattaaggaacacaatttctccctgtcattgaactctgactaatgagtctatttctgggtaataagaaggagcaggaagtgacaaggcagtgtaatgaattagtggcccagaacctcgttagtcagaataatctttccacgaaaggtaaatgatgcaaacgttaattataaagccagggtggaaatgcatcccattatttggcttcctaagaaatctatcccagttattatgaggcatttcaaacaacaataacaataataataaagtaaggctcagtgagaactttagtccttggggagacttgttccactggtggtggccggtagggggagcacagctttctgctttcaaaaggggctggagcttggggaagccaccacgcccctctgggttttgtaccaggaaagatgcggtagagtccctgtcccggtttctctgtgccccgtagggttggtcattcagggctgtccactctagtcatccagatccagatgaggtgaggagtttaactagaagtttcccccatccaaagagagagagagagagagagaacaaggctgaggattttgcaggaactctggcatgttaaagggggtcagagatcaaaaccatggaggaaatagaggttaagaggtcaggctctggaatcagccaagctgaaaccctggctcgccatgattggaaaagtcccgtagcctggtttcctgctctgagaactggtggctaccagaagcatctgtttaaggaggtttttatgagcattaagtgaggtgtgcatgtgagatacttagcatccattaagtgcttcatagatgccactgataatgtgttttgaatgcagagtgaaggttgtagagctggaaggcatgttaggggcatgttaggggcattgaaggaggctaccttgttgcacaggtgaggggggagggcaacgtcactcagcaattcagcggtgggggcaccgaggcttccggctccaggctcaggtgaggctctgtcatctcaggctgtttgtcatagcctgggtttttggccacagcatagaagggaggcagcaggggaaagacaggaagctaaatcagtctcaagaaatgcagttgctgagaccattcctcaggagagcaaataaaccatattaaaactataaaaaagtatcctgcagctccgtggtaataaacttgtctgtgacttcacggcttagaaggtcccagcttctgaagatttgagcgatctcttgcccacaaaggggccggataagtcatttgctgaagggagagaagtttgaagcaaagatgctggcactctccggagcctccttccaggtggcgtccgattgaagcggaggctgggagctgcttttgttttgaaggctttgtcggtgtctgactggcaactcttggtaatgagagaagaaaaaacaattaattggaaatgaattttaattgtctctgactcctcatttgtaggctattaaaatgagttccctattaaaatatcacatcagctgcctcactccaagataacagaaggcgccccaaaagctcttctcctgccacgtccagtacccactccaccctcatcccctttggcaaaaagtgggctcggaggttttaagcaaaatgaaccaaagaaggaaaaatagaaaaaaattgctctcaaatctttcctttctttctttctttctttctctccctctctctcttactttcttccttccttccttcctttctttctttttctttctttcttctttctttcttatacatttatttatttttgctaaggaatacatgtctgcattcatgtagtattctgtggctgtctgtttcgttcccatttctgagtgctgtggcaacgtgggttggaaagcagggctccgctggagctgggccttctctgccagctgctcagtctctacctggaatggaggctgtagtggggctggggtgaggccaagggaaatggacatgtggtactggggcaggagacaaggctaggaggcctgacagtcgagggctaggactactgtgtccccttctcctccctgcctcacttgctcctctaccccactgggtcagggaggttcatttctcgacatggatgctgtccgagaggcgtagcccttcttggaggcctcagatctaggctaaaaccacctctgatgctgcccggcgaggtggctgtgtgatcagagccagccccttcccctctgctccctctgtgagcaatcctaggtattcactcagtagatgctaaaggcctggggcccaggaggctcccagggaatgtggcccccagccccttctgaaaacagacgtccttccctctgcttcactgtcggcagaggctcccctcttcctcctgctctgtcctttctcactccatcctcccttctctgtttcctgcccccatcatctttcttctgacccttcctcccagccctgtttctctccaagcaaaagcgccaggaattcctgcccaacaggctctgctcaagaacttgctaggaggcttttggcccttgcctttctaggtaaggtctgcactcagcaactttatggatgccaggagggagccattcctatctcccccaggcagaggcataatcagcctagaaggccagttccacccctagcctccctggggcgctatctggcgtctatactcatcctccccgcccaaccccatcactgcacactttatttatggaaggccagggacacctgtctccatccttctacattacctgcatattcacaggatccaccacagctcctgcttgcctgggccttgtcagctctgggcttgcagagaatgtggttgaatcagtgttagccctgggctggcagggcctaccggtggctgccctcaccctcctctgggctggcagggcctaccggtggctaccctcaccctcctctggagcccacgctgggctgggcatatctgcgacttggcagaggtggcaaatggctcagagccctgtgagaaccaccaagactcagcggtataggaagcagacgccttgggctaattcacaggccactggagagtgacaaagcgcccatcgacagtggtcgatcaaagaagtggcatcgaaagtggcaaagagaagtgtgtcccctgagctcgcctcagagtaatgacctggacgctggtggaggcaatgatatttgttggtttgagagctaaggcccctctgaaggccaagtcaaggtttgggggctccaaaccttggacagcagcaggtgcttggctccgggacaaagaggcctctgtcccggctccacctgagagcactgggctggctgttggctgccccctggctgcaccgcctctcagcagcagatggccaggggcccgcagcgtgccctcgctgtgttcctctccacgtgcacatccctttctctttgtctttctacacaaattgcctgtttctggagtggactcggctttccacaccatgggtccgggaggaccggccttcttggcaggtgtgggaggaacaagcctgcgtggtgctgtccctccctccccaccaggagcagagcagcaaggggacccttgaacatttcccctctggggaggcctcaaagcatagcacaggcccgaatgcattgagggttcaggcagggatgccagcgagccaggcttctggggccaggtgaaggcagaggcggcgacttgagcaaatgagcctcctttgaaggcaccgcacccccaccgaggacactgggcctgcttcacgaagcacgcgtgggcgtgtttggatgagcgctgtgtggctctgcagctccgaggaaaccgcatcagacaccccgacagctggagtgcctcaccctttcagtctccctgggattccaggccattctcttcggcctggcctcttcctattcacccatcagaccaggctcaaacccaccttgtcttgttcatggtgctgtaggctggcattaattgtatgacagaatgtttattcatatatatattttcccactagactctggtgccaataggaaagggacacaattctacttaggtatttagtactcctggtacatagtagggcctctgtggaggcttatggaattcaaatacccatggaccagccttggcctcttctttctggccttcaaaagaaaggctttgcgataagttctcccttaaaacagagaagaccacggtgccggggtgggggtggggtgtgaccgtgttccttgcctatttcccttacaacagagaagaccacggtgccggggtgggggtggggtgtgaccgtgttccttgcctatttcccttacaacagagaagaccacggtgccggggtgggggtggggagtgaccgtgttccttgtctatttcccttaaaacagagaagaccacggtgccggggtgggggtggggagtgacctcgttccttgtctattttaggctttagcctaaaaatagatggggatggagagggctagggagggcaggagggtcagaaaactcctgaggtttctggtggtaaattgtgagtacaacaatggatcaagaaggtgaccccagaacccttgctgtgtgcccactggggtacagctggtgaccaggaggatgctcagggctgcctgtgggctcctgagtggagagacttgaggttgaccagtccatttccactaactttgtaggatgcctaccttagaggacaaaggaggctggtggccttctctgagcagggcattatggtggccccaaaaggatcacagggccctttctgccagcccccaggcctgtactttgtaagaactgcaaattgtgtcctcattgtctgtgtgtatgtgtttcagtgtgtgtgtctttcttcttatctcttcatcatctgggtcacctgcccacctctggacaaagcttgcatttaaatatggtgccagacagtgacgtgatacagttagcgggtgatgcttgctgctctaattttgtctgcttttgggaactctgcaaaaatgctcttccatccctcactgggagcactgctggacaaatggtactaaagggacctgtaccttggggggcccaggtgacacctgagaccctctgtagacagcatggcagccctccactctctcggctctccttcctgaggctggagaacagagatctcacgtttgcagaagtccttttaaaacaaagtgccagaacaaggatttgacatcaccagtgagaaaaaataaattcatttttgcccacacctccactcccccgtctgttggtgtcagactctgatgggttgaaaggcggcacaaagagaaagagggtagggagatgatggcaactcggggagataattgacttcagaaatgctatgtcttggatgtaggaagaaaacaagtgaaaatatgttattttacaaccttgatacttctgacctcatggaaaaaacatacacacacagcgtagggtgagcaggtaggcaggaggaagggtcctagcacggggtgcgggcgccctcgcgtggccatgagaagtagtgccacacgcacacgttctctttcccagagaagcagacgtgctgcacaagtgcttggccaccgcctacactgaaactggaaagagctcactgaaaaggaatgcagttcataaaaagtcttccttctctacccaagacattcttgtcactcctagggctgtcattcttgaaaaggagaggctggtatagtaggaagaaagctcaatcctaaagctcagtttggtgtttgtggcttagcggctggacgtccttagtgtgtcttggcttgtcgcctgtaaagtgatcagcatgacctggatggtgcttctgcttccctgcagctgggatgctctggccttgaggatgctgaaacaccagagagctggccactcgctggtatcagtcgggcaagcgaactctttgtgtgggattgcttcatttcatttgaagtcattcattgctatgattgtagtctttttctggttcccatgaatctggtgttggctcagtgtaacagaaccagccttattgttcccatttgcagttacaagaatattgccattgttatttgcaagcctgatttccctgtctggttacctgtaatgctgcttctctgaaattctctgaaagacagaaaaaccttccccgcgggatataggttatcaggcacctaaactcattgcagctccaagacatgcatggattagggaccaagatgtggggctcatagtttacagaatttggtcttatattctccctttcatctggatcttcatacagctactcacttgctgctagaaaagaaagctcccagtgtgccagatggattccaaagtcccatttcctgcattcatcccaccatatttgaagactcttttcttttcaaatgcttagcccgggtgagcagacctcaaccttcgcctagcacccatcttcctgatcctgcctgagcttccagatccccagttccatctttactttggttcttgtataagacgaagagagcatttatcttttctgtttaaacccttgggatatttctgtttagcaagacagcaatttcgggcagctacactgttttattaagtatattaaacagcagagtagctcatctgttgtcgactggctttcttggctcaaacccaatatatcacgggtggttttcccaacacatttttaaattcttattactggctaggatatgatttcacaaatgttattataataattcattagtatcttacataaccagtaatacagactgaacctttgccaaatgcattgttataactttttggaatggtggccgcattaattaatcattgcttgttgagtgcctactatgagcaagagaatttgcatttttgttctttcatttctcatgacagcccaataagggaggtaggattatctcattttaaccaaaggagactctgaggccgagggaggctgagcggcttactcgagttctcgcagctgctatatcctagaggagaccaaattcacacccagcttggactccaaagcttgtacatttctcatcatgtgaccctccacccacagactgtctgagtacaaaattccacagagggccttgacttagaagaccctctgccagcattttgtctgtggttttgtgtgtcgtctcagatgaaggtgactcaagacttcaggcagaggatgttttccatttaaatcccctaaaagaaaatggccctgtttctagaagagagaaaagcccagacgtctgcttgactttgcttccaggggcaaggactggggtccagatccataatctgggagagtcttttatggctttcacctttggtgttgaagaggactggcaagcaaaccccttggaccaatggtttcacccttggaaacttagctgggtaggtccatgtcaccatgggactggactgacatttagccagattttgaaatgagagacttgaacctgaacccttgcttttctcttctggataatttgatttttagcaagaggctgttggaagacacaaaggtccattttgtctcaaaacaggtgaacatagggaagagaaactgaaaagggaggctttgggagcacataactgttttcagatatttaagtgctgtttggtagaaaaggaatgagatgttttctgtataattacataaaacaaaaccaagactgatggacagaagttatttgggagcaatctgttcaatataaaggaaattttaagggtctaagctacccaaagaagtgaagggctgcgttggagtttttctagcactgagggtgtgtgtatctgtgtgtgtgtgtgtgtctgtgcctgtgtacatgcgtgtgcgggggtatgcctgtgtgtgcgcatgcatgcgtgactgtgaacctgcatatgcacatagtggagggagcacataagagacagaaggttttatcagacgaccttcacaattccatattttcaggaagtctataattaaatgttttaacatgggccttcaggcaccacaattagccattggagagacagatttgctcaagaagtctgcctggtgcactttttcttcgttgaaaattttaaaccttcaaaaatgtaataaaagtagtgtattgaacagcttccctccatatttactatgcaccttctaagaacaaggcgtcttcttccacagccacaacacaaggtatgaattccagagacttagcccagatccacttcagcctctggagtagtctgaataatgtccgttattacagtcgcctcacgacggacctgtccacttagctgcgttctgttgccatatctctttagactcttcgtatctggagcagtgctgttgcctttgtctttcctgacactgacatttttgatgatgacagactgattggtagtgttgggcacttttcagatgttgcccaaatcaccagcagctagatctgcctctggcatctaatacatatggaaaccgcacggtgggataggaggaactctgtgccctggtggcctcaggtccccgagccctgccctgcttgcaagcacaacttatgtgggaggcagtgagtgccaggaatggatgctcaaggcctgaagtctgtcctgccacttcaggccatttgagtttgcgcagatcacccgcctcccgtggaggtccacttcctcttctctgcagtgaggacctttcgtggcagtgttgggaatgacatggcatattacaggtagaagtccttaataaactctagcaaagtgctagaccaatgcaatcgtttattatttatttttaacatatcagcgaggtgcctgaagctagaactgcatagtgagattgaaaaacttgtgaggaaaactatggggaaagatgaaagccaggctggccaggcaggacggctgcatacgcagccatacatgaccctgagctcctctccagttgtcaagtggtgatccctctgtgcccacttccaaagcctctggtaccagcaatgtccatggcttattgagcatttactgagggtcaagcgctttgccaagagaagcccaaattctcataagaacccagaaagttcctatgagcaatatgttaagatgcagagatagagtttcagagaggttacgccatttgctcaacctcatgcagtcaggaaatgtcaggactgaacagcacattaccagcgccctgcagaggcctggcatccttgtcccctccactcctcctatgccatccttggtggccctataacacagagccttgtgacacacagctggtcagcaagccctactataaagtcacagggttgatttgaatctgcaagtgatcagctctcctgaagcaggaccttgtctcttcactgatatgcagatgtatgctaataggctccagagtcacccttccctccaccaccttctcagctttatttatttactgacttgatgaagtgaagaggctggagaactaaggaattcatgagcattgcagcttccggggcccctggtaacaaactccctgtctcccttttcctgcctggggcccagactggaccggggtttgagggaggagagaacacaggtgcctgaccatgtgctgatgaggccctggacagccttctaagggcacaccctgggcactcgtgagttgtctccatgtgggtttcagtggggtctggtggctggatggcctgaccatcacaggggtaggtggctcagccctctggctctgggcagtgcccaggtctggcccagcgctgaccactcagctttctgctctctggtatttctgctctattcaacacagaagccatgagggcagctgaggccccaagggcaaggtcttctgagtcctgcttgatcatggcagagaaagaggagcatttgaaacagatgcccttcctcctgtactccctctcccagtgtggagctgtgagatgcaggaaaggcctgactactggggctaggagttttagacattctactgcccaatgctgctacatgtcacagttcctcaagggcattgctcttttcttccttctctctctcttcctcttctcccatctctttctttggcaagagctcttggagctcctgtttcttttccaccttggggaagaggttgtcactggatctgtccactttctatgactgagcctctcgtgtctggacttctgacgctccgtgtgaagcagaggcatggccagaagcgaggctagaacaaggctgtccgggacggggcctgcacatcggtgcatggagagagagtggttcaggagccccacaagcagctaccttcggctaacacgtccgtcttcttgcacacagcttcctctgacatcattttatcatagttattgcagctatcatgttacatgattgcttttaaaataaaaaatatctcatttctggagaaagtgctcacagagagcagctgctgcccctgtccactctcttctccattcatgctctgtgcccactcagggctggaatcccctctaggccaccgtcgtttgctccatgatctgctcacagatggaagtcagcccccctgacatttgggaatctgctgcctcccacatcagaacctgctccctccagctcttcacccatctcctcccctgtgcttgagtccagatagcctccatgtgcaaagacacagaagggcgttccatgcatgaaaagaagaaagtgcaatggaaagaagtagggagggggtgcctgtggagtcaagcccaaactctagatcaaatggaggaaagggttgtcatcgtgcctgccaatcccaatcatttttacggcctttagaaggtactgggttgagaaggattccaaagccaagtctgggctccacaagataggcagccgtgattgattgataatgtccacttctgggcgtggacacagaagtgcgggcatgctgcctgcccagctttcagcggtgcctttcccaggagctgatcgctgtgcctctgattatgcttcttcctctgccatttgtgtccagtttctcccatttccctctgatggcttctagataactagtgccccctagtaaggtagtaagaaatattgtaaaaatgttacagcatctgtatcgcttgaaacttctttgaaatgtaaaatcttgggtctcaccacagataatactgacttggaaactctggggtgagctccagagagctgggttctgacggccctcccagtcaccctgatgcaggctgacattgagaaccactgtttgttaggagaattttgaggcatgggctttccgatggagaaggctagtgctgatgtttgactaactccttttttgtttttaacaaagtcatgcaaaggtgaatctactagtttaggattctctgagtgaagcgccttgagaaagaatgatattttatagcaatattcagcggcagatttttatcgagcttcagtaaatccctcctggacaaggggagatgaggctctctgggtgactgcaagatgtgaacccagacaaagacagtccaggagccctgaccccccatccttctctggtatttacgtctctgtgttggccgtcacagcaccttgccctccctcaccaagggctggcctgctcatgaaattgacattttggattttaccaaaatgaatcggaaaagataccagatatgggctgttagagaaacatgggaatacctaataacatgaacttttctgtggatttgagcacatctatgtatgtgtctatgtacttgtctgtgtatgtgtgtttctgtgtctgtgagtgcctgtgtgtgtgtgcgtctgtgtaggcatgtgtgcctctgtgtctgtgtgtgagatcatatctgtgtctgtgtctgtgagtgcctgtgtgtgtgcacgtctgtgtaggcatgtgtgcctctgtgtctgtgtgagatcatggctgtgtctgtgtctgtgagtgcctgtgtgtgtgtctgtgtaggcatgtgtgcctctgtgtctgtgtgtgagatcatgcctgtgtctgtgtctgtgagtgcctgtgtgtgtgtctgtgtaggcatgtgtgcctctgtgtctgtgtgtgagatcatgcctgtgtctgtgtctgtgagtgcctgtgtgtgtgtgcatatgtttgcataggcatgtgtgcctctgtgtctgtgtgtgagatcatgcctatgtctatgtgagtgcctgtgtgtgtgtgtgtgtgtgtgtgtatgtgagcttgtttctgtgtctgtgtgtatgtctccctgtgtgtgtgagcgtgtgtgtttctgtgtctgtgtgtgtgtctccctgtgtgtgtgagcatgtgtgtttctgtgtctgtatgtctccctgtgtgtgtgagcgtgtgtgtttctgtgtctgtatgtctccctgtgtgtgtgagcgtgtgtgtttctgtgtctgtatgtctccctgtgtgtgtgagcgtgtgtgtttctgtgtctgtatgtctccctgtgtgagcgtgtgtgtttctgtgtctgtgtgtatgtctccctgtgtgtgtgagcgtgtgtgtttctgtgtatgtatgtttccctgtgtgtgtgagcatgtgtgtttctgtgtctgtatgtctccctgtgtatgtgagtgtgtgtttctgtgtctgtgtgtatgtctccctgtgtatgtgagcgtgtgtttctgtgtctgtgtgtatgtctccctgtgtgtgtgagcgtgtgtgtttctgtgtctgtatgtctgtgtgtgtgagcgtgtgtgtttctgtgtctgtgtgtatgtctccctgtgtgtgtgagcatgtgtgtttctgtgtctgtgtgtatgtctccctgtgtgtgtgagcgtgtgtgtttctgtgtctgtatgtctgtgtgtgtgagcgtgtgtgtttctgtgtctgtgtgtatgtctccttgtgtgtgtgagcatgtgtttctgtgtctgtgtgtatgtctccctgtgtatgtgagcgtgtgtatttctgtgtctgtgtgtatgtctccctgtgtatgtgagcttgtttctgtgtctgtgcgtatgtctccctgtgtgtgtgagcgtgtgtgtttctgtgtctgtgtgtatgtctccctgtgtgtgtgagcgtgtgtgtttctgtgtctgtgtgtgtatctccctgtgtatgtgagcttgtttctgtgtctgtgtgtatgtctccctgtgtgtgtgagcgtgtgtgtttctgtgtctgtgtgtatgtctccctgtgtgtgtgagcgtgtgtgtttctgtgtctgtgtgtatgtctccctgtgtgtgtgagcgtgtgtgcgtctgtgtctgtgtgtctccttgcgtgtgtctgtgtgtgtgtcgtgtgtgtgtgtgtgttctcaccctcaccctgtggctagagaacccggctaagtgaaaagcaattggtaggctgagctgaccagtccttccaatctcaagtgctgtctctggaaaaagtacaccgaggacccagcccctagggctgcaggcagaaccgacgcacctagtgacacctttcacccgccctccacgggcagtggctgggtcatcactgggtcatctccctggcacgagggatgcctggctgactcctgcaaggtctcacccgttcctgatctgaacgccttcctctgtgagctactgatggaggcagccctgctggcatgctgtatagctgaggagcctctggtttccttcctggaaaatggggcaatacctgcctggaaggctgctgtgaggactaatctaagaatctctgtacaaaaacagcagctgtggttgcaggccacagggggtgttctgcaaggaccccgaaggacccattcagaagagccttcacctgctcctgctatcctaaccccatcggctgcagggagtcctgggaggctgagggccctccctcctcgtggcacgcatgcagctgcagagctggagagcggagccctctcctctgccagcctgctcaggactgtgaccctgggtggggaccagggagcctgccggccttaaaccctgcaaagtagaggagcccagcatgagcccggttctcacttcccctgcaggccactgacacggagagcgggtccttccttgttactgcaccctgagcgcatctctgctgcaatttgctctcagcgcctccactgaaagttgcctgcatccattcagttctgacagccatatccgaaatcagctccctctcggtgctggatcccctttggctcctggaggcccaagagaggggccgacccagtacctactggatcacggtggcagccgctgtttcctgggaagcatgttgcgcccacactccctctgcacattttacctaccagccgggactgagatgtgaaatgggatgagctggaaaaggcaggtagatgtcgtacacatcccaacaccagctccccaccgttctctctctatcacgcaagcacgtgcaaggacgcaggcccataccactttctaggaattctgtggcgaaaataacaacccacagtcatctgcacagcaattattattcattataactgaactttccctctaaaaccgaagcttccctttcttactgcaaaacccaaccagaaggtctgcatgctttattcctaatcaaaagaagaatgctaacacctccctggcagagcatcactctccgcgcttcagcagcccctggctttgtttctctggtttttgctcctctgaagtgaggtgagaaagggactggggatgtgcacatcacaggagccccttcggcagggctgtctgcagcggggcactgtgcagggtgcacgggaggaggggaaacaacctctgccctccagctctggtacctaagtcccctcttgggaaatgaagggataatgcaataggctccagaaggaatctgaccaggttgatgccttaggagctgagagtggaggtgaaggggaggaggcacatcaagggggctgatggaccctaattgtgcatgatagggtgggtttgtagttgcagaaatagaccctggatgtgtccgaggttcactctgtcaatgtattcacactaaacctgccctgcagagggctggaacgtgaataaaaaatcctatcatgattgctctggagggggctggcacgagtgaggcgacctgatccccacgtcagcattcatgctcatattttggggtgatgcagggcgatgccaaagagcaggtggctggaagttttagaggaaggtcccctggggggcactctgggttgtcctttgtcattggagctgatggcgtcctaggctgacttctccccggggtcttcccagccctggtgcgtgttgctttgtgaggcgctgatctgctggagggtgggatgtacttgcacttagaaagggcgttctgaagggcaggcggtggcaagaggttattgggactgaatcaaaccccacttgctttggagttcagcagagttgggttctaattctaactctactacttactggctggccgtgtgaggagaattcaagatcacttaacctcgcctaacttcattgcttcattctgtctgtggaattgggagaaccccctctggattttgctgtgggagtgaaatgagctcctgtgtgtggggctctgaggcacgggccccggggagagcaacgtggggtgagcagccttcaccacgaggacgtcctgacgacagtgactctctctggctctgccaacctgaccacagcgatccagggaggatcctcctggctgggtggcaagtgacgtctctgagattataaagctatagtcacacaccccctccccacctggaaactatagaaaggcagttcccccacactccctagtgggtagcctgctccactctgcctggaaaccttttctcaacagcctctgagctgctggcagcatcccctggtgccctccccagcctgcagcttccagggagctgggaggagcatgcccttggactgtctctgtcctctggctgacacagccgcttcctttatgtaggacactggcccctcatttgctcagctttgggacctgcaggtggacatttggcccagtcccaggctggaggccctgcggctttcccaggccagctcatcatgccacctccctgcctctgtttgagaagcctcctttccctaacattcctgcattcctagagagcagagggcctctggaggcagcagtgcataccctggccctggagatgacccgtgcaagatacaggctgggccaactccttgggactccatgtctccagctgtgtaggacaacgacactcccagccccaccatggtgaagagcctgagttggaggtgggcaagaagaccaagggcatgagtgagcctcaggggtgagtgagcccccactagggtgaacgtgaatctgttctgtggacgctggcccagagcccagaaggaagacccactccgagctgctcagggctgggataggaccatctaggtggaaggctcaacccaagaatgagctttctagaaattctaagttggagtgaatttttaaaacaatagcttccataggtgtcatgtgtaattgttacaaagcccctgggaagagggattaatggtggccctttgagatccttgcagaagcccagcagttgggcccttgacaagaacaatcagcttggggggcagctagcactgcccaaccccagtcagtccttcctgatgcactcctcaagccagatgaggctccccagccagcatccatgggaagcagctgggggctcatggagagtcgggcatccatgggaagcagctgggggctcatggagagtcgggcaggcaggctgacagcactcagacttccccagaactgaatggcaatgtggggtcatggcagtttgtctctgatcccgtctgtttctgaccctctatttactctgctgcaaacacattggcctccatcttcagctggtcccctgtacgccaagcacattcctgcctcagggcctttgtgctttctacttttctgctggcagtgctccgccccctcgtagcaagtgaatagctccttcacttcttatcagaaatgcccgccaatcgccctatttcagtagacacagagccacagcacactctctccttacctttttttaaaaaaatcattttgcttaaggatttcaatgtgacatagtagcattcacttgtttatttgtttagtgtcaatctacctccacaaaaatagaagttccacacgagcagggacattgttttgttcactttttcacccatagtgtctagaatatcggcataaagaagacactcaatatataagtttttagaatcaagtcatggtaactagagggtttttccagctctgacatcccacagccttgtcctacataagaagtgctatcctgggctcaggatgcttacaaagaagtctggagttggccctgcctcccaggatcttcccatgtcaaaggagtgggaggaggaacacataaggggctaaacagacaggggctgatgagggtcccctccccagtccccaccagagagctacaggccacaggccacagaccacggtctcccaggaggcctctctcagagcaggctgggcctgggaacttgctcaccatcctgtcaggaactacagttgaccctcaaataatgcggtggttgggggtgccgaccccttgcttagttgaaaattcatgtataacttttgacttctcaaaaatttaagtcctaataatttactgttgcccagaagccttgctgagaacatgaactgtcaattaacatggattttgcatgttatgtgttatataccataatctcacaataaagtaagctagaggaaagaaaatggtattaagaaaatagtaaggaagggaaaatgtatttactattaatcaaatggaagtggaccatcataaaggtcttcatcctcgccatgttcaccatgagtaggctgaggaggaagaggaggaggaggaaggagaatcggtcctgctgtctcaagggtggcggaggcagaagaggaggaggcaggaagtgcaggcactcttggtgtaacttttactttatgtggatccacgtataagtggatccgtgcagttcaaatcatgttgttcaagggtcaaccgcatctggttcagaaactcctctatgtgcccctcatggctcagtcccacctgaatacggccataacgaggctggccgagaggcacagatcggaatggggtcatttcctttgatttcctttgatgttttcaaaggtagaaaataatttcgggccttttctaagaagcacttagctgtgggctggaggttggagaatgttccatctgctggaaatgctaattagaggcaatcataacccagacttgacctgccagggcacactggagtgaagcggcgccctggtgggagggtgtgggggcagcggagcccaggccgcagggccacgttctgccccagttcgggacaacctgaactgctggactcagagacagcagggactgagctgggaaacactcacctcacttgcgggtcaggactcaggggcaggtcagggctcagtcccagggcccctccacgtcatgcaatgcttcccactgctgttagaaagtagcaaatgatttcactaaccccatgttccaggggagaaggaaaattgtacctgcatgaaacgtgacaacaccgtcacgcgtggtgtcagctggttgacagccatttgcaccctcccagcgcccctcccaccccagttgcttgaatgtgatctcgctacccagagggatgcctgccccttccaattgcggcttcgggcagggacacgggacatcagtgctgggtgactctaatgagggctgtaaggtttgcgacccgctgtggcctgggccttccagggtcccggcagagccctctgctcctcagaccatcaccggcctggccccaggctaggggccttcatgggcgtcagcgtggggccggcgtcccgccttgcctgtcttccctgtccacctcaccttcgcccccgggggtggctgccgagtggggcagccacaagttacttgaattagtgccgcccaagtgcctcgggtgggagtgggggatgctgcaagggacgcaccgaaatatgaatgtccaaggtttgtgctcctcaaagaacaaaaccattccacaggagtgccactgggagagggacaggcggccacaggcgagggggcccctgggtctggtggcggaagggctgtgaagtcccgctgctcctccctggcctctgctgtagatctttggatggtttccaccccgctcccaccccacgtatcctccagccccacactcacatccccttggtgccgaatgtgtcctagcaaagcaatcagtggacgtatttttaaaagaaaactcatttaccacgcaggcctctggagtcgttgatggaatagccctcctctgaatggaaatagtggtgtgatagcctcccaggagttattattgcactgacactgcagcaggctaataaaccccggaggggtgcgacgcgcgctgccaggcagttctcacatctggatgaggagccgcagatgccgcgggggcgcgcctgcagctccccagaacggccaccggagggcacccgcgccccccgagccgcgaggctgcctccaccgagctggagaacaggctcccggggcgggggagggcccctctcagcggactccagacaggggggaaagcagcttgcccgtcctccttccgtgcccctcctgggtttctgaaagcgggtttcaaagcagggttggaaggagcttggatagcacacgccactaactcagaaaaaccttgttaatggttactttgaaagtccatgaaaaatgccttccaaacacatcagaatgggatggcacatgtcatttctcttttggagaagtcagtgagtttagctccaaaaccccaaaggcgttaagagtcgcggctcctccctccgcctgctgctcccaggcacacgctgggcaggctcttctctggctgccccctctgtgccccgggttgctcttgccctgcggcagcgcctggcctgtcggcttcacacccccagtgactgtccagcatctaccaggcagcagggcccagttcatgctgtgggttgagcttgatgctgcttcttcaggggtgggggtgatgcgtgtgtggaagacaccagctgctcctagagatcagacacccaaaccgtcagtcctgctgtctggagcaccattttgaaacagaaactaggaccctcagaaaatattaccatcttgcagaccaatgggcaggtgtcccatccccgtctgagatggtgtcacccctgctcagaggcctgtgaagccccacacattgtagaggtgtttccttaggattgttagagccctggtgcgttctgcaggacacactcttagttagctagttggtttttaaaaatgcatttagttagttttaattttacacgtgcatgccttcagtgaaaacgagagctaccaataaattggatgtttgttaaggaaaatccccgcagcccccgaggaaggaaggaacactctccaaggatgtctccctacccggagctctgctttttacttgtgaggaccgagccccttctcctgggagccagtgcactgcctgtggctcagcatgaggcagcggggagggcccaggaccagagccaggcaggaacacaggtggcccggcagggaaggctgctctggccctgccttgcctccccacccagtattgcccagcccctcagaagctagccatggtaaaaaggcttggctcaggaggggctggaaggactgagaaaggagaagggtcagagccagggcagagtgaatctgtgtctcttctgatcccagcacaggacaaaagctctttagaaaaacaactttcaggggtttaattcaacactatctcagtccctaggccagactcatgagattcatcccctggaattcagtttccccacagatgttgcttttggccccattgccctggaagcactcagtccttcacagatgttctgaggacaggtggaggtgaagtcctttaggaggggctggctgggcctcagcagccttctgagaggacggaaaacggaaggccagcaagggtgccatggatcttgggtcctctctgtcccatctcccctcccataccgcaggcttggactgcactcctcagaaggtggggtcaaagctgttctcacccttcctgctggcagctggcaccccaggccacctcctcccactcttgccacctgccagccttccagagagactcagcaataccagttattactggtcgtatacctattacctgggtagagggattctcatttacacagttggctccctcgtccacatatgatgaaattctatgggataaccctatgctgttgtgttggcaatgacagcagagaggacatgaacctggtggtctcacaggcagagacccatgttgctgaattcatgatgagatctcatgatcactcatgatgagatcagcacgtctctcccctcacacgtctgtccctgagctcacctatttgtggaactgggtagaggagcacaccaagatggcagagaaggcctggaatccagatgagaggagagaaaagtatgacacgcagcgaggcttccctgaacaccttggtgcaactcacacattcacagatatttcattaggaatatgaacaaaactgtcagaattccagaaatcgaggggcaggcattctcccagggggatgcatgtagcaggtagagatgtgaaccccagtaccagaagaggtgggcatgacacacaaacaccccgagatcagatggcagaaacccggcccaagccagcccagcgcacctagtcagttcccggggactgtggagatgctgcacgggctcagcgcgaaccttgctgcacgggctcagcatgggctcacggcagaacccaagcacccaggggactccacgcttacccggaagggaaagcgttctctgccctcagaaacatacaccgtggacgctgccttgtacggaaatacagaacacacttcccatctgcaaggtgtcagagcgcggggcgcggggcctgagtgcgggagaatggctggaagcagtgagaagcagcctggggtccaaggaaggcaggacgtgggtgctaagcgtaggccgtggcccacatccttggggaacaaaatgggaggattcctccttacagtttgggatcatggagcagagccagcctgaggcacacggcgggtgaagacggggctcagaaggaagctgtttgtcctgtccaccccgtcacttccccatcagagcggagagaaatgtcaaggggcgggtggaagtggaagctgccttgatcgaaacccagggaggagaaggggaaatcctcagcgagggcccttggagcgggtggggagcaaggggctttgatcactcagcggggccttgccctttctggaagggtgtgcggtctgggtgggcgagtctcagaccgcagaggatccggcgcctgccccactctggagccggggagccctgggctgtgctctaagcaaagcctgcagcccccggagggcgcaccaggggcccaggccacccccggccctgcacccacagcctacggcccgtccccccgcagtgccagggcggttccttcagtccttgaccttcgcagaacgtagttcagatcctcaggcccagcaagcgcccctctgttggcggccgggggccgcggggagttcgcccctgtgggtctgggcccaaggcgctgcccggatgataaggcagcttcttcggcggccgctccttttccgccccgtgcgcccagggagtccacgtcacgaggagctccgggtccaggctggccgagccgagagccgcggggcgtgggcaggcgtggaccccacaccaccttgctccctcctggccccccgccaaggcgatgtcgtcgcctggactccatccccttgtcttccctgaaagcccccccccgacttcccttccatgtccttcactgttttctctcctccttctcttccatgttgtcttctgctgaatataaaccccacagcgggtaaagatggcaaccccagggcgcagccaccccgcgctcccgctcggccccgccaggtggcgctggcgcgttctttccgcggcgcggggctgagcggagcggggctgggctgggcgcagcggtcccggggctgggagggaggcggcgcatccacacagctccgccaggtgccaggcgtctttcgtgtgtcatgttactcattactcataacacgaacaaaacaagactgctgggcgaggtaaatatcgttagcttttctaaatgaagaagttgaacactatggcatctgatcgagaaaaaagagggagctggaccccctcctggatgggactgcgggcaggcgtgggaactgtcatcaaggcatcccacatggcccctaggtaagcacgagtgaaaagtctcaaagggaagggaggaaaaacagaggaaacgggcagggagtcacaggctgacacttcgcggttctttacaacctcggtctttctcttgtccttccactctagggcttgaaaccttccctccaggattgactctgatgcccctagaccctgcctacaagaggtgccacctcccatgcagacctctgggtgatgctggcacagggctagtccatctcccatgcagatctctgagtgatgctgacacagggctagcctatctcccatgcagatctctgggtgatgctgacacagggctagcctatctcccatgcacatctctgagtgatgctgacacagggctagcctatctcccatgcagatctctgagtgatgctgacacagggctagcctacctcccatgcagatctctgggtgatgctgacacaagcctagaccatctcccaggcagatctctgaataatgctaggtcctttttgaagaaactgagagagaaagagaggggatagagaggagacagaatgagagtagacagaggaaagagagagcgtttccattttggcatctgggccaagaaatgcagccatataaaactgttcttacctaagctttgatgtggcatcagggatgaaagtgccttccctagcttcataaaggatgtcacacaaatgcagagaatcaggcaagaacccaagaaaccaaatcacccaaacctctgtgtgactccttcagggttatagaccctgaaagtaaagtcagaggcaaaaaaggggttaaaaaggagactcgattgcctagtgattccaggaaagaatcaaaggggtgaatgtcactgagcattcagggttagtgtcagatgcttcagccaagaaatcgcacggcaggtcattaaatgaatttagctgggattctgggttttacattgtggttaattaatctatgtaagtatttatagtagtaatggcagagcagggaccatcagccaagacaagtcattagaaggccaagttgggcaggcctgcagatgggtggggagggttgggactgggagtttggccttgcagggaatcactgtgttctgggcatgggggtcagggcagaggtgggctggggaaattcacaaacaatcccagagctcaggagtcaacaccctgggcaggctgactgcgagtggggcagaggctgattcaggggattgctttcctctttcttagttgttctgtctctgtgagggatgaggaaaaaaatctccagctgaaaaatgtcaccttcaacctgacactggagccagaacatttacaaatctgcctgtcaccatgacagcctgacggatagcaaccttagccgggacggagttaaatcgccaggataagtcttgcaaaaagttttggctcttaagatttttatcatcaagacaggttaaggaatggggggcatggcttccaaacacgaaggagactcaggccccgtgcctgacttcccaggaaatccagcagctgcaggattatctattacctgaggggaggtgacaggagaaaattacccagcaccagccccatctgttgctgagcaccgtttatttcaccttcacttaattcacttggtttgtcatttttcctttgtctcagtgtcatccacccaaatcctatgtatatatgccctggtgttcccagctgggcattgtggctgcagagacaaagcctcgggtatcttttcaatgagctgcagtcactatggagtgtctctctcctcccctctccactgtcatttcctccataattgattagaaactggaagcgagagaggagaagctgcttttacagcctgggtctgcaggtggaagcacattcctgtgtttgacttcgtctctggagacctgtctctttcaggaagaggtggaagagtatacatgaagtatagcagacttgtgtcactaggagagagattgcaaaatctgggctctcacactattcttggatgcttggtcacccacctctccccgactttcgttttctcctctgtcacatggatctaacacttgttctcctccctgccaaggttgctgtgaaggctcaatgagacagtatttgcagatgctcactacatcatatagaggcctattcaatgagaacatgcatttaaagcagttaatggtgcctcgcataggagaattgttcaataaggaccattattattagtgagaatgtaagtaatagtgatgacttgttacccttgcagcatctactcttcctctagttctcaagctacagaccattttcattcaacatttattcagtctccacgggcagcactgtattctgtcttagggctatggtgattttttaaaatgcaaacaaaatgccattgctgggtctagaagctgagtctggtgggaaaggcctgtgacagagtgggaagcagggcttaggtctgcacccagctcagagtagggggagttgccggagaagtcctgatggagaaagtgacatccctctgggttctgaagagcttaagccacctgctcggtggcgggaaagggcgtgcaaggctgaagcgggaagtgcagtgaatgagctcaggcaggacagggagctgggcctgggaaccacgggctggcagtacctccgaaggacggctccagagccgagactggacgtgtggacagaggagctctcgctgaaggagcagatttggttttatgccaagaccatgagctttgcggaagggcataaaggcttttaaacaggatcaggtgagcctgatgatcactcaggattgggtggggcgtgaatgcagaggaaagatcagctgacaatgtaggaatctggaactcgcagagaaactgcctgcccttgggactcgctcagcgccctcgcagccggaatggggcctgggaagggaggagccccagcagaggggcagtcggagagccatgaaattgcgacctgctgccaccagagggcagtgttggacgggctgggaggagcgccgccgccgccgggagggtgcaggagagagctgtctgccaggggaaacgcacgatgcgttgtccaggacattctcacctgaaaatgctctgggccacggacaggctgaggattttagtacccacccccccgccctgaaaagaaaaatctctgtgacgagataggcactgggtttgtataagaattcagagtgtggccttagtgtcttggccaggcacccagatgccacctgcacacctctggcttggtgttggttttattgtgcttgtcctaaacctagcagctccccctgagatgatgtcaaagactggactgggctagctcagaaaggtttcctgaacgaatgactttacgcaaaccttcatgccggcacatgttttcatacagattgtctcattgaatttttagagtgatccgatgaggcacatattcaggttttataaatgcaattcagagaagttacatgattttccaggaaatgaggttgtcgggttttgatccaatagctcagactctttcctctgtacccaacaaaccttgtcagtctcctttgtcctttgaagtggggtgtttttctcctccacaagtgtcaaatctgtgaatagagcatgtttaggagcaacttcaccggcatgcccaccttgagaactaggggatggagcagcgggtcggatggagaaccagaaagattgagcatttattgtaacagaggtcttacatggacgtttcccacgtaatccttaaggcaaccccatgggtaggattatcatcccaatattccattgaggaaagaggctcagagaggcaaactttcccaaggaaacacagctagtatatatcagaggtctatgtcccttcactcctgcgctctggactctgatcctgtcccaagagtgacagcagctgcagtatgtgtgccgctcaaaggacagggctggagtgcatgagaaaaactggacgtgtggtgcagaaaggtgcatgtctaattatcattgcaaacaactagcctctcaacagaaagtgttgttgatgtgacagacatgaaagaacccacagccaaagggagccggcccccaggggaaggagggcgaattgtacttgggacaaaaagagctaacagcctcggagagaacaaatgtccttggtagtatggggtgtggggtgatgttgggtgttcattgtcacgtgatgactgtggaaggatgacacagcacaggacgcacccggggaggccagcaggaaggagagttgagtgcaagtccgggaaaacaaggcttgatgatatgcttttgtatgggagtctcaagttgcttgagttaaggttgtctgggagacatgagttacaccagcacccagcaccattacttactaggctccaaagaggaagacatatcaagttgtaggggccttcccttctgcccacaagcctggatcagaccacacaacattgtgtttccattttccatatggattctggactctttccagagagtcattctttctctattagtccttttctttcgtacaccctgtagctaagtgaccctccactgtacctaacctctctgagcctgattctcatgtgataaatgtggatgatactgctctcctaatgtgactgctatgagaagggaaagaattggcataaataatagcaattagctgaggcaatggcccatgttaaagccaaataaatgttggttttatctcttgtttcacctttgtgtctcaaacaggcacacccacgcatgcacacacacacacacacacacacacaaggcaaaccacaacccttgccaataaatctatgctaagtcagagttaacttagaaaatcaacatggtgcagaggcttttaaaggactgacattcctcgggttatggaaaacaataataataaatcttaaggaatgtcaccttgcccctggcactgaagacaagaacccgtttcgttagtggaatagccctgagtatatggagaaaagcgacagagatgatctgttcacagcaaggagagagtggcagtttttagacgaagccggctgggggcacggtggaattgccatgtaattgtcaggctctttgcttattaatttctcagatttcctttcaagataaggacacaaggtaagatggatgtgaatataataagcacagagattacagtcattacaattttagaatgaactggaaaatgtggacacatcagtctgcagccagtcggatgggtctctcagagcctcttggagaccactgagggctgcggcctgtgccataagtgtggggcaattttgaaagccttacttgatctaccgttgcagcttcatccagagtactgtctgattgttttacatattggctgattattttccatgcccaggacctttggtaaccttggaaaattgttggccctccattatctcctcaagtatcacttctcagccctctttctgaagctcctgttaggcatgcgttgggtcttctcactcttaactgctattccatagtccccatttctgtatttctgggtgactttccgggatttatcttccaattcagtaattttattttttctgacaatgtttaaccattccttgagattttgaaattttcctgacttgattttttattttcaaaactctatatactaggaatgtacttttcaatgtcctttaatttatgtatttgattcttacgtatttccacatgaattcctgcatagtccctcttgcgttatttaattacttgccatccacaggagcctaagaaggtgtggtttgtgatttttcctcatgatcagttgttttctcctgtgcttggtaatttggactatgagaacaacttcaggaggaaaacgtgggaactagaactcgtgtgtggcctgggaaagagcatgttcctccaaaaatagttctatatttgcctctgtcaggggctccaggagtgaatccacataggaagtatatatctgaatcccaaattcacctgcagcacagacctgcaattacacattccctgcagagacacagctgcttcatccagagctcaggtcaagacagacaaagttcttattgcccccatgttaatattgggatcttttttctaattcaacttttagaggctctctaaggttccaaccttatggaacattccacaaccttccagagtgaaagtgtcattcagttccttgccttaggttcctgctataccctggccacctagggcacaggaacagaaggtgtaccccccaccctaccccagtgctcacacactcactactctatttcatgactcctttgtgtcctgggtccttggagaattcccttgttctcttgcaatcataatcatcactagcgacatcatcatcatcatgattgacattgactgagcccttgtgctacatgcgtgctctgctctaaccactttccatgaatgcctcatttcacccgcataacaacacgatgaggcagatgctgtaattattcccattttacagatgagggaattgtgatttcctttaaaaaccagacatttcccattggaaaaaaaaagtcctaaagatttagctaataattttataagaggactaggagaaagccaaggaggagaaggataaggagttcacaaaggaaaaggattttccaaggtgtacatggcgagttcgcatcaaagtcagaaccagcgccctccgtccttgctctcagcccagtgccaggcttccttgttaggagtattcttctcatgaaattctactgatttcttacattgtagcccagatatgatttgctgagggatatctgagagaaagcctatgtgtcctttccataaagcgtaccttgactgcttttttcaaatctctctcttgctactgatctttctaacttaccttgatattgggaagtgtggtctttggagccatgaatggagaattagggaattagggaaacatgagaggtggtggaattaattcattgtatcttgattatggtggcgactatgcaggaatatgtgattgtcaaaattcattgacttgttcacctaatgtgtgttcatcttaatgcttgtaaattataccttaacaacgttaactaaagaagtaattaaactcccacattggacaaggagggatctagagcactgaatctgcacagattctctgagctcagtctaggaagagaagtggggctgaactatacagaagatgttgaaattagaaacgtactttccaggaataaattaaaaattgagtttttgtccacctacaataatcaggcactgtgccaggtcctaggactgtaaagaaaactatctctgatataagcttataatctaacagagaagacaaaaagtagaaagcttaaattcagtgagtaagtgctatgatagaggcaggagtgggttgcaaaggagaagcatcaaatacagatgaatggcacaaaaggctttctgtaggacattcatatagagcctgagaaatcaggagaactcctccaggatcactagctgtattagttcattctcatgctgctaataaagacaaacccaagactgggtaacttataaaggaaagaggtttagttgactcacagttcagcagggctggggaggcctcaggcagcttacaatcatggaggaaggggaagcaaacgcgtcctccttcacatgaaggcaggaaagagaagtgccaagcaaaaggggggaaaagtcccttataaaaccatcagatctcatgagaacagcatgaaggtaaccacccccatgattaaattacctcccaccaggtccctcccactacacctggagattataggaactacaattcaagatagatttgggtggggacacagtcaaaccatatcactagccaaagcagcaggtgtgtgtgtgtgtgtgtgtgtgtgtgtgtgtgtgtgtgtgtgtgtgtgtgtgtattcagtatcttgaactagaccactgctcttgaagatctcttgaccatgtagaagccaggataacacatttagctggaagctaattgtgaagctgggaaattatgcatgtatagtgatgttgggcacaaactcatgttatgttcaggtaacaagcagagcattttgggttcctttctttaggagttgtctaattttacttcatttgttatttctgattatattggttaccagccaaaaaattgtctttcttggccagagattcaatgccttattctaaatgtaaggaaaatccttccttttgttgaaacttcagaaactttctaattacctgcctttattcaatacctcaaaatcaattgtatgcctgtcataatgtttgcatcctaacactctcttctcctcattccacactttgtctctaagagatccccctttctcccatagttttagctacctataagttcacaactgttcattctatatctctcgccaagacctgtcttcttagctccacttgacccagttgcttactgggttgttatgatcttctagcttcatgatgacctacttgtttattgggttacaataatggcaaagacttacactgtgcttactgtgtgccaggcacatattaatccatttaatccttacagcaaccctttcaggaaggtgctagtattgtatagcatcctgttggatgccttccaggcacctcatcctcagtgtgtgcagaactgatgtaacccttattcccctgaaacctgcaactcaaccttctgtacttcacattttattgacaccatcttttaaccaggtgctcaaacatgaaacctagaaattgtccttgatcttttccatacgcaaccaataatttaccaccaaaagttttcccttcaacttttcttaggagaagtagcatcatgtagtggctgcaggttttgtctctggagtcagacagcttagatgtgaatcctggttctgccatttaatagctgtgagtccttacagaagtttcttaaagtttctgaaccctagttttcttgtgataattaaacaagttaaagcatgtaatatgtttaggacagtgctcgggaaaaagtaataaaatatttctttgtctttctcagtttccagttggtggacagtataatatactaaaagaacaaaaagcaacaagggttttgctaaagaacaaaacaattggtgacatacagacctgggattatgtcaactttttaccaccacctatatgcatgacttgggcaagttggtgaatccactgagcctggtttctttatctataaaataaagataatgccacctacccacagggccattgccaggaataaatgagaaactgtatgtaaatcgcctagaaccatgcctggcctatgaggacagtatatgttattccttttctcctccaatcactgctcttgaattccctcatctactactaagaaggaaataattggctgccctagaagcaactgggcatggtagatgggcaaaaagaagggagccactcaatgcatttgtcagttttgccaggagctacaggatccagaggcacgggcaaggattctgcctctgccatccctagctctctagctttataaatcatggcttatgtgtttattcttcaccaatgtccaatactcatatttctggaaaagtatattcctcaaccttaccatcctcattacagcaagtagtgggctccttaatgctgagggccttgttatttcttcatttaatggtgtgtccatggggtcctagggcatgagggcctagacaaatgcaaggctgtctctactccatcagatggaaggccaggaaagccaagggaggggtggaaataggggtggaggggtagatgtgtcatggttggaccccagtgcaaaatgaaaatgtaccaccctggttttaaaagtatcaagtatttcatgatggcaatagcagagcattaaaccaaacatgggcccttctgagcttgaggccctatgcaactgtgtgtgtcacacaaccatggctcctgtccttggtgggaaagacgtggctccctttcccacagtttcctgctgccttctctcagatgctcacaaatagcccaaaccgccctcagacatggctttgtcttctttcctctctactcaacttggacattgggagactaccttacaaagcagagttcctgacccacatcttccatctcactttcaccagggatcggcccacacttggaactcctgatctatcagggtctgcttttccaatgagctttactccttctctctaaaaagaaaaaaaagtacggtagtgatgaagtgccgattcttaaaagtcaacatatagtgagtgctagtttaattccacataaactgcttttagcataaattcctatttcatctttaaaatgatctcatcatcacaacagtagctactgtaataactccatcttacagataacatacagatttggagagacccagcatcttgtccaaggtcacacaacgagcaggtggtggtattgggtttagaactcactctccactctggactcctgagtgagggaagagtgcccagagcatggagaggtgcatcatgggatgaaacagagagcagcagcaccagacaaacaggaagaaatgaaccatctctctaataggaagattaaatactattgagataccatgctttcccaagtgactattgttttaaggcaattttaaacaaaatagtgataattttgtttggttttgttggaatggctttctgagagaataatgttgatttttagctacaggcaagaaaactgtaaaattgaaaaataatacaggataggacgaatagccccgactattttgaaacatttcacaaagctgcaataatataaacggtgagttttaggcataagagttgatagactgatgtgtataacagaatagattgccctgaaacactcttatacaatataggatttttttgtatgaatatgacaatctgagaaatcagttaggggagaagaggatagtcataattgttgtagcaatcactgattaactattagtgaaaaatctacatagatcccaactcttggattatagagaagaaagtaaaaaagcaaagccattaacattagaagtattgagttagataggaggaataagttctggtgttccatttcacaacacagctgagtatacttcataattatgtgttgtatatttcaaaatagccaaaagacagtatgtaaaatactctcttcacaaagagatgataaacattttaggcgattgatatgttaattactttgatttgatcactccagaatatatacatgtgtcataataccaccactttgtatcccataaatatatacagtgattgtttttcaattaaatgtttttaaaaatgtagaagtaaatacaaataaatatacatcaggattttggaaggagaaagtctgtgtacgcccaaagcaatgacataaataatggatgaaagactgatgaatttggctgcattaagatcaaatctctctgaatgtcaaacatcataaaatttaaaaacagttatgtcaaccagatggcagaacaggaaatcccagctcttgtctcctcacagaaacactgcttggaacaatgcacacacaaaaacactttcacaggagccaaagaatccagatgagaggccacagcaccttggtggagcacagaaataagaaaagctgcattgaagagagtaagaaggagtttcacattactgatgtcaccaccacccaaacgtcactcagcctagtgtgaagaaagatagccttgcatgaggggaagagagcgaagtgagtagcatacgttgctgcagacccaacaccaggacagctccagtggaccccaattccaggcctatagccccagtttccaggcctgcctcgatggccccgggccccagacccacttccataccaagccagcccccacagctccagcctctagggttgcatccacagaaccaggctttagacccacttcagcacccgatcagcactagtgactccagactccaggttggctcatgtggttccaggctctaggccagcccttacaacccccctggttccaagctggtctatattgacttaggatccctgaggactcaaagcctaggataactcaatcaccaggctggttcccacagaacctggctctaggttcatctccatagacccagtctccaggcccataccaggggaccccagtgccaggccagctcctgtggattcagaatggagtcccacacctgtggatgcaagcccgaggctcatccatggggaccaaggctctagtcttgccctcacagatccaggcactgggctggctcctgtagacccaagttccaggctcattcatccactgacccagacacagccccctccagcatgaggacttcaatagcaagcctcactatggacctcattagatggccccacccaaaatctctgtagaagctgactggtgaaggactttacataacaaggcaataagtaaaaactggaaaagatgcctaatttttaaaatgcagacaccagtgcaaagccacaaggatcacaaataatcaggagaatatgacatgaccaaaggaacaaaatgaaacactagtaactgaccccatagaaatggagatctacaaacttcctgacaaagcatttaaaataataatcttaaagaagtgcagtgagctacaaagagcataaaaagataactaaaaatcaggaaaataacgcatgaacaaaataataagttcaacaaaaagaaaccattttaaaaaacagaaatccggagatgaagaacatactgactgaactgaaaagttccatagagaacttcaacaacagatttgataaagcagaaaggagaatcagtgagctcaaagacaggtcatttgaaattacccaggcagaagaataaagagaaaaaaagattgagaaacagtgacaaaaccctctaggacttacaggacacaatcaaggaaccaatatacacattataggagtttaagaaggatcagacaaagagaatggggcagcaaggtcatttaaagacataatgacaaaaaacttccaacatctggagagggaaatgaacatccaaatccatgattccaaaacaaccccaaataggttaaacagaaagagattgtcatgaggcacattatagttaaatttgaaaaaatcaaaaacctagaaaatttcagaagcagtaagagaaaagtgacttgtattcaagggaaacttccctgtaggactatcagcagatttctcagcagaaatcttgcaggtaaggagagaggggatgatatattcaaagtgctaaaaggaaaaacactgtcaagcaagaatacttcactcggcaaagctatcctatacaaatgtaaaagactaaagacttacccagacaaatgaaagctgagggcactcaacaccactagatttgcctttcaagaaatgctcaaataagttcttcaagttgaaatgaaaggagactaacaatataaatgaataaaactcattataaaggtaagattcagaatactacaatgctgtaatgatggtgtataaattacctctaattctgctatagaagttaaaagataaaatcattaaaaataaccatagctacaataatttgttaataaatacacaatataaaaaagacataaattgtcacatcaataacatataatgtgggaagaagagaagttaaagtgtagaatttatgtatgcagtttaagttaggttgttttcagattaaaataggtttataactataagatattttatagaagcctcatgataaccacaaagaaaaaacctgtgtgagatacacgaaagagaaagtaattaaagcatactattactacaaaaaaatcaaatcacagaggaagacagaaagagaggaagaaaggagaacaatgcagtcagaaaacaattaacaaaatagccagaacaagtccttatctatcaataattactttaaatgtaaatggattaaaatctcgaatcaaaagccatataatgactgaacaaattataaaagaagatccaactgcatgctacctttaagagactcatattagctttaaggacagatgtaggcagagagtgaaggaatagaagaagataatacatgcagatggtagccaaacaagaataggagtggctatacttatactggaaaaaatagactttaagtcaaaaattgtcagaagagaccaaaaaaggccattataaaatgaaaaagggatcaattcatgaagaggatataacaattttaaatatggatgtacccagtattggagcacctagatacataaacattaacaaaacaaaaaggagaaatagacagcaatgccgtaatagtaagggactcaaatacctcatttacaataatgtatagcttactcagacagaaaaatcaataaggaaacaatggatttgagcagcataatagattaaagggatcctaacctaaaaaacataaagaacattccatccaacagcagcaaaatacatactattttcaagtgcacatataacattctccaggattgatcatatactaggccttcaatcaagtcttaaacaacttaagatttaaattttatcaagttcttttataaccataatggtatgaaactagcaatcaataacaggaggaaaatgggaaaatttacaaatatgtagaaattaaacaacccatttctgaacaattaatgtgtcaaggaagaaataaaagggaaaattttttaaaatcttaaaacaaacaaacatgaaaacataacataccaaaacacatagcatgcagcaagagtaatcttttttatattactttatttttaactgacataataattatatacatttatgaggtacaatgtgatgttgtgatatatgtacacattgtgagatgattgaatcaagctaattaacatattttaacctcactacttatcatttctttgtgatgataacttttaaattttactttttaataacttcaaaatatacattattattaactatagtcaccatgctatgtaatagatcactaaaacataattcttctgtgtaaatgaaatattcttcctgttgaactaaaactttgaatactttggccagcatctccccttaccccatcaccccacccctgagtccctcaaaactactattctactctttacaagttcaactttttaagattccacatgcagtaagatcatgcagtatttgtctttctttgcctggcttatttaacttagcataatgtccttcaggttcattcatattgttacgaatgaagaatttcccctttttaaaggctgaatagtatttcattgtgtgcatatgtcacattttctttattcattcatccattgatggacacttagttgcttctgtatcttgattactatgaataattctgcaaagaacatgagattgcaggtatctcttcaatataccaatgtcaattcctgtggatatattcccagaagtggaattggtggatcatattgtaattttatttttagttttgaaagggacctcaatattgttttttataatggttatactaattaacattcccactgacagtgttcaagtgttctcttttctacacattctttccagcactgtttatcttttattttttaataagtcattctaacaggtctgagcatttgcttttgacaaaattcaatatctcttcattagaaaaacctctcaataaattaggtacagaaagaatgtacttcaacataataaaggtgacaagtccatagctaacatcatactcaatggtgaaaagctgaaaacttttcctctaaggtcgtgaataagacaggatgcccactgccaccacttctactcaatgtaggactgaaagttttagacagagcaattaggcaagaaaaataaataaaaagcatccaaattgaaaaagaagtaaaattgcctctctttgtattgaagggatcttacacagaggaaactctaaagactgactctaccaaaaaagctggtaagactaatatttgaattcactgaagttacaggccacaaaatcaacatacaaaaattagtgagaactaacagtaagctatctgaaaaataaatgaattaagaaaacaatcaatgtgggtaaatattttaagcaatataacaaaccgttaatacccttatatataaagaacttcctaataagaaaaaacatgaattcttcaatagtaaaataaactgaaaatatgaagagctagttaaaatacatgaatgttcaagaaacataacaaacttctaatcactttttatcaaataatttaaattaatataaaatttagatgggcctctgtttgtctcatgaattggtcaaggttagaaaaatattgacttcattttggcagtaagtattcctaaacattaacattagagatgtaagacaaaaagcaatttggctgcatgaaacaaatatatgaaaatacacctgtgttcccattaataggattatttcctagggtgattaaaaaataactgagaaaaatatttttgtaaaagactttattgtagtgttttaggaaatagaaaaatagtggaagcaacctaaatacccaagggaatgattacacacagtcaatataatacaaatcatgaaataacagaaatttatacatttcatttattcatgaaaaatatattgagggccttctatatgtttttatgggcataaatcctgaaataccaatgaaccaaacaacaaaagcctttgctcttcagaaacttacatttttgctgggagaaaatgggtaagaagcataacgtaaacccccaattttagcaaatgttgaaagatgataaatgctaagaagaaaactatgtctgggtaggtgatggggcagatcagggaatgaggaggtggggttgcaattttaaagtgaattgtaacggtcctcacttggaaggtgtcctttgaacaaatgcgtgaaagccacaatggagcaagttctgtggggagagaagaaaacattctatacagggaaaaaaaggtgcaaagttctctttgcagatatgagcattgctggtgtgttcaagaacaggaaggaggtcaatgtggctggtacagagtgagcggcagggaaggacaggataataagagtaaggtggggaggaggggaagagaggtaactacctaagtgtggggttgtgggggccattctagaaacttctgcttttactctaggtaaaaggaaatctattggcagcttctgagcagaagaatgacacgaaataactcatgttttaaacagatccctgtggttgcactggtgtttttaggctccagggggcaagagtggaagcaggcagacttgttgggaggctattttgcaataatgcaagaaataaatgacagtggaagcagtagaggtgacaagacaggattagtttgaatgcaaaggcaacaagatttcctgatggattggttgtcagatgtaaaaataaggtaggagtcaagattaacctaaaagtttttggccttggcacttgaaaggatggagttggataacagagatgaggataaccttggttagggaagaccagcagtcatttctggacatgttaacttcaagatgtctgctagccttgttgactagacagttgcagcttagggcaggtgtcttgcacaggattgacccacttgagagttatcagtatataaacagtgtttaaagccataaaccttgaataagatcctaaaatggagcgaatatagatacaaaagagagttcgcccaaggtgtgagccttaggcactccagcactgacaggaaggagggaagaagaggaatctgcaaagaggtcaagaggaaagagtcctcgtgatggaaggaaaaaataagacaaaacaggagagtgtgctatcctggaagctgaaggaagagagtgtactgtaaagaggaaatgcttagcagtgcagaatgctgctactaagtccgtgtgttgactgagaacacacactggattagcaatgcagaggtcattttgaccttgacaagaacaatgtgagtgcactggtggggtcaaagagggggtggagcagaaagccatgagagacagaaaggctgaacaaacccattcactggtgccagataccagattctttcaccaactcaggacaactctcaactctttctatggcctctatcttctgctttccctagatcactcttgtcagcgtacaaatattctacaatttctcttatctatttttcaaaactacttaatgacatggaaaaatacccatgatatcttgttgtatgcagtgcataacaccaagaatatttaaggtgatgcctccgtccccaccaacaaaagcctcaccaagcgggtccatgttccccatggctgaagagagtaggggcagggaggaaagagttgctctcccagagtcttctctggctctagtgtttctccagctctgtactgaaatcttattattggtttcgattcaggtagttattttatttctgtcatgatatctactcaaacatgagagtcagtcccttgcctttaattcactaatggagtggttttcaaagtgtaatacccaaaccagcaccattaacagcaactgagaagttgtaaaaaaaatgcagactctctggttccacccaagactcagtgaatcagaaactcttgggttgggacacagagtctgcggtttgcaagcctttggagtcattctgattcactactccaaaccctccacaaatccaaagctgtgctaggtaggaaatgttttcatagaggcatttgtgggttacctagaaggatcacacctcatgccaccctgcaaacaaataaaacataatggatggacattcctccttgtagaaatgccttttccctgcccctgtccccaccaaggagtatttctggctactgcactggtttgcttctctccaaggcctcctttttacccccttcttctctctccttattctctcaaaaaaccctagaagaaaacctaggcattaccattcaggacataggcatgggcaaggacttcatgtctaaaacaccaaaagcaatggcaataaaagacaaaattgacaaatgggatctaattaaactaaagcgcttctgcaccgcaaaagaaactaccatcagagtgaacaggcaacctacaaaatcggagaaaatttttgcaacctactcatctgacaaagggctaatatccagaatctacaatgaacccaaacaaatttacaagaaaaaaacaaacaaccccatcaaaaagtgggcgaagtacatgaacagacacttctcaaaagaagacatttatgcagccaaaaaacacatgaaaaaatgctcaccatcactggctatcagagaaatgcaaatcaaaaccacaatgagatacaatctcacaccagttagaatggcaatcattaaaaagtcaggaaacaacaggtgctggagaggatgtggagaaataggaacacttttacactgttggtgggatcgtaaactaattcaaccattgtggaagtcagtgtggcgattcctcagggatctagaactagaaataccatttgacccagccatcccattactgggtatatacccaaaggactataaatcatgctgctataaagacacatgcacacatatgtttattgcggcactattcacaatagcaaagacttggaaccaacccaaatgtccaacaatgatagactggattaagaaaatgtggcacatatccaccatggaatactatgcagccataaaaaatgacgagttcatgtcctttgtagggacatggatgaaattggaaatcatcattctcagtaaactatcgcaaggacaaaaaaaccaaacaccgcatgttctcactcataggtgggaattgaacaatgagaacacatggacacaggaaggggaacatcacactctggggactgtggtggggtggggggaggggggagggatagcattaggaggtatacctaatgctaaatgacgagttaacgggtgcagcacaccagcatggcacatgtatacatatgtaactaacctgcacattgtgcacatgtaccctaaaacttaaagtataataataataaaataaaaaataaaaaaataaaaattaaaaaattaaaaaaaaaaacaaaaaaaaaccccaaaacaaacaaaaagaagaaggaatgtttccaattgtctttggaagagcaatttagttgcacataacctttgttgtcttttctctttacaatgcttgtaccctcaagaacagcctccaaatacggaaaaacagttgttaagaggaggagtgctgctgttagctgtaagaactaccttctcggaaacttctgtgtatatatttatagatctaaatatctgtatgtgtatacatacactagagataaatagtaatcatcatatgtatacacatatgtattaataaaatgaaatgtgagcagttacccataactagtgggataatagatggcttaggttttcttccccttctcttcctacttctttgcattttcaaaatttcctgcagtagatacattttactcatagagacaagtgatttttttttttttaagacaggatctcactctgtcactcaggctggagtgccttggcacgatctcagctcaagtgatcctcccacctcagcctcccaagtagctgggactacagatgcatgccaccacaccagcctaatttttgtattttttgtagagacggggtttttccatgttgcccagtacgtctcaaactcctgagttcaaacaatccacccacctcaggctcccaaattcctgggagccatggtgcccggccaagacaagtgaaaaccaaggaagaaagaaaggaagaaagcaggaagggaagaaaagaatgaaaaagaaggaaggaagaagtagagaaaagaaaagagcagcaagctagtagcagagagggagccccggttggtcaggggtggaggttgcaggcctgctcatggtggtgtgtatgtctccagtattgtgtctcaccctctgctgctgccaggtgtctccatagaacaacataaggctaggaatttagtctctcattgtaggaaaaacaaggatgtcatgctatacaccgggtgtgtaatgataaagaaatgcaaatgtttagagcaacaaaacggaaacatggttaagtacatgttctaaatataaacgacacaatgccgtaatacaagtaaaagaaagggaaggaaaacataacaatctggtgaggtacaaaagggtcttgttgtcccttagctgtgataaagttctctctccaaccatttcctttttgtcttcttcctagctacatggtccagcctagtctgtctcaatttatcctcagctattaaatgatgttaagtgtctcattaacacttcttgccaccaggagcaattgtgtcctaagcgattttcttaacttctctgggcccaattcattcttttctatttctttggagaactagtatctgaaaaacctttcctctcttcctttcagtatgttttcctttcctgtttatctccacaaagtatatgtttatactacaagtaggcaatcatatcatttttcctctgtatttctaagtcttactcaggccagcttctcttatttcagagtcaagttcagtatgctgtgttgttagcgtggcaaatctggacaggtctgcagcaacctcaatttttgcctcctcagaagaaagacttagactgaggggcataaggcaggagagaccgatgcaagttttacagcaggagtgaaagtttattaaaaagttttagagcaggaatgaaaggaagtaaagtacatttggaagagggccaagcgggtgacttgagagattttagtgcacagcttgacctttgacttggactttgttacgttggcattccgcacgggcagtggcctgccagctcctgggaggggctgcgtgtgcagtctttactgaagttttgcacatgctcacttgaggctttcttcccttactggtcgagtatttctagaggaagatcatgtaccagttaaactctgccattttgcctcatagggcacatgcttaagcccactcacccaactcctgatatcgtacctggaagctgctgatcaccagcttcagatttttatttatttatttatttattttaagacagagtctcactctgtcactcaggctagagtacagtggcgtgatcttggctcactgcaacctccacctccagggttcaagcgattctctgactttagcctcccaagtagctgggacttcaggcatgcactaccatgcctggctaatttttttgtatttttagtagagaaggagtttcaccatgttggccaggctcgtcttgaactcctgacttcaggtgatacacccaccttggcctcccaaattgttgggattacagatgtgagccaccacaaccagccaagattttttctatctattgggagactcccattccctggcgctggctgaaaccaatgatcattttagagaaacagtgtaacaactacttggccatctcctgatggtcacctgacattcctgccgtagggagtccttttctaccttgctcatgtctgactaactacttactgtaacagtgtcataggctaaacacatgccactatttggagtagcacagtgtaagtcatgtgtcccatctcttcatgtacagttgtcctctattccactctcgccagcctttaccgagtgtcatccatgcggcatttgacaccaccttcctcccattctacagaggcatgcccagtgtccacagcctttgcagtttcccgtggctaagaaacaaggcattatatggtttgagtggtgctattttacctggcaaatgctcactgacatttattgaaattgatgccttagttttacaagccaaagtggtcatacagtcacacttgcttaattaatgcttcctaataaagaagcaaaatctgtttgtgcctgaaattgtgcttggtgctccaggaatagtcaccataacaaacactaggaccttgtgatacaaaaccagaaaagggtgagtattagatgtggttattagatgggggccaggccacctcagatatggtggcttaaacaagatggaattctgttcccttctcacctgacagttcagattatacaagagaaagaggcagtgcataaatagaaggagctacagaattactattcctatttatagcaagattgaaccagataaatcataagtttcttgtgtaatgagtccagcaatacttcccaaaggcaagtcaatttgcagaggttggtgaaacctggatcagaggtgagaacgggacaaataagaggaagaattttgtttagcattttagactatttcatctgccaatcactgtttgccatttttatgtatatgtttaacagctttattgaggtataactgatatataataaagaacaaatatttaaagtgtgcaatttgataagttttgacatttcgtgcacatttgtgcaatcatcacaatgatcatagtgaacgtatccatcaatccaaaagtttcctcatttctttttgtaatctgttcctcctgtcagcctcctttcctcctccttctatcccctcccccagcttcaggaaatcactgatctcccttctgtcaccatagattcatttgcattttctagaatttcatatatttggaatcacacaatatgtactcacttttgtctggcttccttcactcagtataattatttagagattgatccatgttgttgcatgtattagtagttcatttttattgctgaaaagtattccacagtatgcatatatcatgtgtttatgcattcaatgattggtgtacatttaggttgtttccagtttttcattagttaaaataaagctcctatgagcattcataaaccagtctttgcatggtgtcttagtcctttcaagctgctgtaacaaaacattattaacagagcagcttgtaaacaacagaagttgttctcacagttccaaagttcaagaagtccaagatcaagacaccagccaattcacttacggtgaggacccactttctggtttatggatggcactttctagctatgtctttacatggtggaaggggacgaacaagttcgcctgggccttttttataagagcactaatcccattcatgagagctctgccctcatgacctacctaattacctcccaaaagaccctaccttctaataccatcaccttgagagttagaattcctttcaacatgaattttggagggacacaaatattcagaccatagcctaaggtcatatggttttacttcttttgagttactacctaggagtggaatagctgaatcatatcgtaggtgtatatttagcttttaagaaattccctgttttccaaaatggttgtaccatttttcattcccaccagcagtatatgacagtttaatttcttccgtatcatttccaactttggaattttcatcacagcaattctaattctgatagtgttatctcactgtggttttaatttgcatttccctgatgactgataatattcagcacctctttgtctgcttactttccaaccatgtgtcttttttggtgaagtgcctgttcaaatattttcattgcttttcttttctccattgacttgctgtatcatctttatcaaaaatcagttatctttgtcagtatggatgcatttctgaactctgttttatttcactggcctatttttcagtatttatgctaatacgatactgttgattactaaagctttttgttgttgttgttgttgtttgaaatggagtctcattatgtcacctagtctgcagtgcagtggcacaatcatagctctctgcagcctttacctcttgggcttaagcaatcctcctgcctcagcctcctaagtagttgggactacaggcacataccactacacccagctaatttaaaattgttttctagagatgaggttttcttatgtttcccaggagtttcttgaactcctgggttcaagcaatcctcctgtctcaccctcccaaagtgctgggactacaagcgtgagccacctcaatcagcctttaaaccaagtcttcaaatcagatagtggtaggcctccaacattttctttttcaaaattgttttgactattctgtatcttttgcacttccatatagatttttaaattagcttgccaatttctactaaaaaatttcctggttttggattgaaattgtattgaatttatacattaatatggagaaaatgacattttaacaatattgagtctcatgactgattagtttagtatatgtctctatttatataggtctttaatttctttcactgcaattttgtagccttcaacgtacagatcttggatatcccttgtcaaatttacctctaagtatttaaatttttaatgacccttttgaatgacattttaaacatttcaatttcacgttgctcattactagtgtatagaaatacaactgatttttgcatagaatttcttgtcttgtaacaatgctactcttgtttgttctagtagtttttattgatttcatcagatattctatatggcaatcaagtaatctgcaaatgacagttttacttcttcctttccagcatgaatgccttttatttcttcttcttgcgttattgtattagctagattctccagtacaatgttgaatagaactcatgtgaatggagattcttgtcttgttcctgatttcacagggaaagctttcagtcttttatctttagatatgctgatagctgtaggttttctatacatgctctttatcagtttgagaaagttctcttaatttgctgagaggtttataaaaattaggaacagatgttacagtttgtcaaatgctttcgtctttattaagataatcatatgtttttcttattttagtttgttaatatgatgaagtacattggttgattatttttaatgttaaactagccttgtattcctgggatagattacatggccctgatgtatactttttatagatttttgaattcaatttactaacagtatgttttttagaatttttgcatatctatttatggaaaataatggtctgtagttttagtttttcataatgtctttttccagttttgtttttaaggtaatgctgaccttatagaatgaattgggaattattccttcctcttcaattttcttgaaagagtttatatatagctgatatgatttcttccttcactgtttggtagcatttaccagtgaagccagctgagcttacaagtgcctttgtggaaggacttttttctacaaattcaatgtgttttggctcttgctcttaatatctatttggtgagatcagaacaatgtttactgtctggccccatcactgacacaagatactcatgcgtacccaattcaatgcctcatgaattattgggttaatcaagttttccattctgtctggtaggaacaggcaagcatccctggccccgtgtgagtgctgggcactgttccttccaatcttctgggaaggttctttgcccggcctttgggaagttttattgcacacatgccctgatcagtcctctgctggatgctcaagggaaccctctgcagatctcaggagttctctgtgcagatttctcctcccctggtattctattctgagcactctaatgttcttgatcttccagggctttcagttgctcaactctgggagtcctctagcctccacctgattacctctccctgcaccactcctggaaatgctctccaggaagtcagctgggatgaatgctgtgctcctctcgttttccatctctcaggagtaattatatttcattgcctggtatcagtgtcttgaaaaccactgcttctagtgtttttgttttcagattgggtatccctttgtccactgcttatagcagcctcagcctcccaggttcaggtcatcttcccagctcagcctcctgagtagctggaactacaggcacgtgccaccacacccggctaatttttgtatttttagtagagatgaggttttgccatgtcactcaggctggtttcaagctcctggactccagctatctgcccgtcccaccctcctgaagtgctgggattacagacgtaagcccgcgcccagtgcttccagtgttttgtctctcttgttgttcctaatcttgttgttgtttccagtgggaaggtaatcaggtcccttttactccctcttggtcagaaacagaagtccaccctttgttcttgaatatataagaaattgtgcataaatcctccttgagagacaactgtttctcttggtcacctccataatgtcagagagaacattcaaagagaggggtgaagatagcgcttctaaaaaatgcatagctgtgagagctggaataaaatgtgcaagggtcatgaggaggtgcttgtaacaaaagcaggagaccccatagccttgcaggcttactgtggtagagggagcaatgcctcaggaaggccaagtcagagaaatattgactttctggatggtcctctgggtgttgtaggaacttgacaacaagctgtttcatgcctgtgattccaagctaaatgtgctacatatttgctaagtgtggaggcatttatgaaggccaaggggaccccacttattttaagcgtcctgttgtgctccatcagtggtaatgggggttgagcagccaaatcatcatgcattacctccgctgggaaattcactctccaggatctaagtggaaaagtaacaacagtttcaactttaggcgaaactcacaagggtgcaagttggagataattggaaattactttggtctgactgtgcccagatggtggacttcctttgttgcaaggtgtcattctcacactgatgtttatgctcactacgtgtgtatttttgctgtaagctgccttaagatcctttgtgggagggaatataggcccaccaccctacaggttccggggttgcttcctcagagcaaagaaaccatgatccaaaaaaggagatggtcaaaacaggctacagatactactgttttgcttgatacctcttttacaaagcaattgaaaagttaataattgtacacatacattgtgccaggtagtgtgctaggtgcttgacataaggtactgcatttaactctcataacaagcatatatgataaaatggtctcaaatttatgagaagcaaatgaagactcagaaaagccatatgccttgatagatacagtgtgtttacgttcgaatcccaggatttgtgattatgctgcctagagaatctttacctttggacagggctataattagtgtattctgtgaggttgccctggaaaacagaaagctcttgggctttggaatgcaacacacatagtttagaagactggttcaacctggaaaagtcatccatttttccattcaacagatacatattgtaggtgatgaaagaggcaggagaatagatcagatgagattcttactccaataaaactgcagcctagtaatggtggcaatgttgagattcaaaaccaactttgcccagcacctagacttgaactctttctatgacatcattctgccttcctgataaaatttagcattatactgacttccattaggctaatggactattttggctccagaggcagcgtgttatagtggttacaacttccaactgtgaaacaggctgcataagttctcattccgtctctaccacttactatctgtaagatcttgggtaaattacctagcctctctctgcctcaagtgtttcattgatcaaataaaggtaatgataaggacttaccaggtaggggttttctgagggctaaatgactagagaacttagatgaatgtttgatccatcataaatactaaattattattattatcatccttgccttccttgcttatacctagaaataccttcttatctagagttaatggggattgttttactttcctatgaaaaactattgcacattaaatcaatgattttagaactagaaagagcaatagaaaaacatatttttaaatacttaatattatctctacaaaaaaaaaaaatctcctgacaaattaggataagtgaccccgggaaaccagagtaactcagctaattagtagcagtgttattactggaacccaggagactgcaagatttctctttcctttatgttacaatgctacccttattccgctcagattttatcttagcacaattgctttggtgtcaagaagatatgggataaattcctggttcctctagcttctggctggaaggcctgtgcaagttaccaaaccattcagagtctcagttttttcatctgtagcatggggataagagtgcctccttcattaggtttttgtgatcataaaatgagataatgcttatactagattaagcacagtggctgacatcctaagagctttgtaaatattaaatatgcatggtgactgacagcactggctttggagtcaaatatgagtagatttgagctccacgtccatctaccagacttgtgtgaatttggtcaagttacttaacttccctaatcctcaccttcatctcatgatctgtacattaaggattgtattgccaatatcttagggtttctgtgaggattagatgaaataatgcgggccaggagcagtggctcacacctgtaatcccagcactttcggaggtcaaggtgggaggatcgtctgaggtcgggagtttgagaccagcctgaccaacatggagaaaccccatctctactaaaaatgcaaaaaaattagctaggcgtggtcgtgggcgcctgtaatttcagctacttgagagactgaggcaggagaattacttgaacccaggaggtggagattgcagtgagccgagatcgtgccattgcactccagccaggacaagagtgaaactctgtctcaaaaaaaaaaaaaaaaaaaaaaaaaagagagaaagaaagaaaataatgcttgtaaagcaacaaacacaatgcttggcataaagaaaataatgcttgtaaagcaacaaacacaatgcttggcatacagtcagtatccaacaaataataacacatgcaaatatcattataattactgtcattattattcttttattcatctggtctctatcaaaaccactgtgtgattaaataatgttctcaaaggttccggacctgtaaaccatctcactacacttagataggggactattctgcatctctagtcagccattttcccccagaccataatcagtaagagtgaactatttggcttgcaaaatggcagccttcctgttgcctgacggccaaaaggcaacttttggtgagactgctttcatatgaactcgtaaccatagaaccagtttgtcagggaattcttcaagcacataaatgattgaacacttactttaattcagaaacatgcagaactcaagatctttgctaatctctacggagggtgaaggaggaagatgaagtttaatccactgatgagagtaagtacgctgttagggcttcattttctgctttctgatagatcctgttgatggagaggaccacagtgacaatcacagtggaacacttggctcatccggagtagctttaacacacttggtgtgagctgcagggccactagagaagtgacagccacagacactgtctcccatgatgattagctggcctggaacaccagctcttccttatctattgttggtatggcacaagtacaaaatatataatatgtatctttgatctctaactttcccaatgagaacagagtgacccagaaacattgtgtgaaatatctaaagtctcatacttggttcatggagaggagggaccagattccaacttctgggctgcaattgatattattactttcttatgatttccacagttactgcttttgttattatttcttgctttttcagatgagttagtactctgcacagacgggttaaatggtgtgccatccagggccacatagccagttgatggctgatctgagacagatccagttcttctgatcctcattttgccgttctttccactacacaatggcaatacaaaaatcctccttctggagtctagccgttgaaagttatgaagcattatctctgccgttcacatcatccagtggtgttttaagcttgtttgccatggcaaccatcaacatattaagcccttcaaagcagggttggaaaggcaactgcagcccgctattgttcctgatgatggatgggagagtgtagagccaaggatcagttactacagatcctcttccgctcaagcgatgtagattacgcagcagctggaccagaattcagtcttctccatggaggtttcctatatggtatgtgcagcatggagggtttatgttaaacacgtagcaaataaaaacagaaataaagatggtaaaaggtcactcctttgtccttccctccctcccttccttatttccttccttcctttttctttccttccatccatctttctttccttcatttatttctatgcaaaggatagcagagtcctaaattccatgttaagaatatgtcagtgaagcagataaacttgggccatcatctcccaagcatctaagaaaacagacactaaacttgatgggaaatataactagatagtttgcttcttgtgtctttcctttttcatcttgtttgccctcccctaatatattcaacaaagaagtgtgcatgtgcgtgtgcatttctgtgtgtatctgtttgtgtgtgtgtgcatgtgtgtgtgtgtgcatgagaaagagagacagacaagaggagagagaaaaagaaagggaaagagagatttgtaaagatattgcgtctatctgctaagaaggcctagaggccaatgtaatttctttgaaccgaataaagaattcatggtcatgtgaagtttcaaaataatttcccagtttaccgttccttttcaggcagtgcatctttttaaaaagaggttattcagaacaagtcagaggagggagggacaacacttttcaaaaaccagggctgtaattagtgctaagcagacacacgtgctagaagggagtgctcaggtacctgggccacggctttgttctcctgtccagatgctgagccagctgcagggtggccagggcgcctgcacccctcaccttctctgcttgtctgatacgtagctggaggcttctctctttgtctgcccatctggctcctggcaccaggaagtaaaattattattattttttccaaatgaaaggctttgaatcacagctgttaattaccagatgattattaaaaacacatattgcctactgaggtttgagaagacaactcaagcgtgctgtctggccctactctcaggggctctcagcctcaagtcatgtacacatttctttaaagaacacaatgtggttttattatacccgcagacaaatgcaaataagaacggaagtgaggagagcccagaaccctgttgaaagttaataaagacttttcccgctgcacctcacaccccagaatctcaagtagtttatcgtagcccactacaggtcttggattacctccatttcaaaacccgcagcccctccgatggtgctaaggcctgtgccccagtgatgcctgagaaaagaaaggaacgacaaggcccggcagaagggcactcataaattatagacctcagctgtcatgctggggtgctggatctcgggtgaaggacagatggaggctgcctgagcaggcacagcctggggtggggagagcagccagtgagaggtggattctttgcatgtcaggggaaatgactggaaattatggctgggcaaggaaaaggcagcaggcttggagcttggactgtgtgttggagtcaggggagtgaggggctccggatgttcaggagccatggggtaggtttactgtctgggaactcaggtccagggacaacaagttcaggcctatgatcaaggagtatcttgttcttcctgaattctcatcgtgatgcaaggcactgtggggaaaaaagacgtcaaagatgggggatgcctgttcatggggtttacaatctgttggcaatgaaggccatgatggatgcagtacttcaccaacaagggaggacagaaaccttagtgctaaacttacacattcaacaaatatttattggatactcatcacggcatgtgtgaagtactatattaatgaacaaaatagaaaaatataaaataaaatctttgctctttttgggcttatattctagcacagtgagacaggcaatatacaatttgaggaagtaaaataggcctgatatagacaaataaattctatggagagaagtcagagaacaggaagggtagccttggtgagggtgagcctgattagaagtaatatgatcagagcaggctccagagaagaaatgacttgaaggaggcgagggaatgagccatgtcgacatctcagatagaggaagcatcccaggcagaggaggcagccccaaaaaggtgttgagttagaaggaaaacttgcaggttccagaaacatcaaggacgtcacagtagctggaggggagtaagaggaagggacagtgagggccactgggtcagagaggaaaacggggaagcaatgcacctatagggccttgaaggctgttacaaatatttagctcttcgttaggagtgagatgggaacacactggatggtgttgagctgaagaaggacagaatctgactctcattctaacaagatgcctctggtttgcgtgatggctctcaaacttcagcgtgaatcagaaccacctggagagcttgtggagcgacagaccactgagtgttgaggcctctcgctagattcagtgggtctagggtaaggcctgggaatgtgcgttactaaccagtctctggggatgattctgctaccagtcttgaggaccacactttaagatttgctctaagagaaacaataggaagcaaagagggataaagcatcctggactccctcccagaggaggtagattggtttgaggccccaaagaaaaggtaggattttgaacaggaaaaaattacatgagaaaagcagactggttgtgtttcttctctcccactctacctgctgctggaaagaatataaagaggtctatacaacatctatttacacagttatctgcctagagctctctctagcgaccctatcttttttgtggcaagttctagcctccctatgcaccttttcaaggtttacctcttcctattaagcttaaaaaaatggtggttgcacaagtcagtgtctgtccttggttctccctgtggtccacttgcttcctctgtctcctggcccctctcacacttggattgctgccatcctctaatggcatctagagacaccagccctttactctactggcaaaataagccctaacccatggctactggaagtgacaggcttttactgaaggcttgttggttctggagagtgatcgcacagcacagaacagaaaatggcttaaaattggctaccaaccatcacagccctaaaatctcctcagccatccatgactctaggaatttccttgttggctcctcttcccaagcctcagtttcctgccttgtaaataggctcattacgtttccaagaacccagtcaccccattgctcttttttgtttgttttgtttttgagacagagtcttgcttggtcatcaaggctggagtgcagtggtgcaatcacagctcattgcagcctaaacctaatgggctcaagtgatccttctgcctcagcctcattagtagctgggaatacaggtgtgcaccaccatgcatggctatttttttccacagagacggggctggtcgtcaacttctgggctcaagcacttctccctccttggcctcccaaagcactgggattacaggcgcaagccacagcacccagcccatgccattgctcttgaagctgattcccctgtcaaccagtcaggctgcagcccctaacccctcttacacagccaagtggagcagctcctctctgttgcctcctaacacttcttcctccagtccatgcctttatgggatttgcattttccaaccccaaacagctaacaacctttgtgtaaggaaaagcagagttctgttaggaagacaaattgtgtggtcctcttggagcatctggcttcaaaagcaacaagtttatatagaaatgctttcttcatccttctaattacacatatgatgtagcataatcaaaagtattttaaatatatcttaaaagtgggggacaaaaggaaatgaaaggagaaaaataaggtgaagccaatacacaaagcaaataccttttcatcccaacagctgctgggacagctacaaatttggctttccctgggttttcaattaaaagggagcctgcttgtgaacttgtgagagccgcttcctgcagcaggaggagtaatgctgattaggtgagttagaggggccagcctaccaatatgccaggaaaggagtttagactaagtaagaaaaaacccatttaaggtttttgttcaaaggcagacagtctatgacaacatctaaggacaatcactctggcaacagtcttcaagacagactgtggaatggagaatatggaaccaggaaagtcagtcccaggctgacactgatgagagaatccagaagaggtctgcattgctctcctttacccattttttaggctaatctgctgtcatacagctcattatgcaaagcccagtttccatgcaaccacctccattgtctttctgactacccaaaatgcaagaaatccctctgtcttctgcatgttttagaacatgatatatagcatgcgttaaatccttattgtataatttttgtaggtgtttattagaaaataagctgcatgagagcagggccagcttgtataccatgttgcctaatgtagagtcgaggtcagagtaataacaacaataatgatagcagcaaacacttactaagaacttacctgctcagccaggatccctctttaggtgttcattagtatagtggaatgtaaagacgtgagtggaaaaaaccaacaagcaagcaaccaattgcacagcagacaccagctgggtggcatccaatccaatttcattctgaccaccatctacctggagatagagtcagatcctacctgttgagggctctcagtcccacaagactgtttccccacttctaatgcccgtggcaagcctatgcatctgaccaacctgctacaaatcaggaattccatgaccttgtccttgggtttgattgttttgctactatggctcacagaactcaatgaaacatttacttgcatttaccagtttattataaagggtattgcaaaggatacaggtgaagcaatgcataggatgaggtacaggggaagaggcatggagataccattccctccctgggtgatccaccctccaggaacatatccagaagctctttgaacctatctttttggatttttgtggaggcttcattacataggcatggctgattaaaacccatttatgccagtgttccattattggaacactaagcatgtgggggttatttatgtcctgctgctcaaggtcatcgccaaggcctgatttttcaaattcgaaaaattgcaacctcaggcataaatgggttaagccattggccaattcgtgatcaacttaaccttgagcccctctgtccttcccagagaaagaggggtagggctgaacgtcccaactctttcatcctgccttggtcttacaggtgacaagtccctatactgaagctacttagggacttccaaccaccagtcaactcattagtgtacaaaaagacaccattttggagattctaaagactttaggagttgtatgtcaggaaacagggttgaagaccaaatatctattttacaatatcacaaatgatatatggtataagataatgcatcatagggttgagatacagtgtgtaatgataagaaagaactattgatttaggagtcaggctatatggatttgaaatctaaaatgtccaggcatgtactaaaaatgtgaccttgggcaacttatataacttctctgtcctgagttttttttatctgctcaaagggattgccaatgaagattaaatgagttaatacacgtaaaagatgccaaagagcttctggaatgacctgagtgttcgataagggttagccttagccctcagggccattagacacaacgggtatttgagaaatattggtacagtgcactctgagttcacacctgtgtacctgggttattgtggactgctaatgaagatgggatgtcgaaaacaagagttgttctgtgaaaacaagttaattttcacagtatataagtttgtttgtaattgagatataattcatgctgcaaaaaacacccttttaaagtgcataatatgatgttttttagtagttgcaaagtcaagcaaccactaccactatctaattccagaacgatttttatcacccccaaaagaaaccctgtacccattagcaatcacttcccattccccgtcctcccagcccctggaaactgccaatctactttctgtctctatggatttgtctattctgtatatttcacaaatatgaaattaatcaatatgtggccttttgtttctggcttcttcatttagcattttgttcatgttgtagcataaaaagcactttttttccttttatggctgaataatatttccttgtgtggatatgccatattttctttatccatttatcatctatcaattgaaattgttatcagttgatagaaatttggaatagttctactttttagctatcattaagaaagcatctatgaacatttacatacagagtttttttttggataatgttttaatttctctcgggcatatatgtaggagtaaaattgctaggtcagatggtaattctatatttaacatttcaaagaactgccaatctgtttttcaaagtggcttcaccattttgccttcccaccagcaatgtaggagggtctccacatccttgccagcacttgttagtgtctgtcatcttgatgatcaccatcctagtgggtgtaaagtggtatctcactgtgagtttgacttccatttccctaatgactaatgatgttgtgcatcttttcatatgcttaccagccatttgcatatctttagcaattaattttaatatgatgtatttgagattgagatagcagacttaagtaaaattgactaagaagtaatatatgccacataaagacatggacacatatgtggagcagataaggctggggttagagattttgtagtagtgaacatgcagatgggcactgaagtcataaaggggagaaatgtctagtaggaagacaaggccaggttcggtggctcacatctatagctccagcacttcgggagaaaaagacaggaggataggttgaacccgggagtttgggaccagcctgagtaatatagtgagtgaggcctggtctttagaaaaaaaatttaaatcagctgggcacagcgatgcttgcctgtagtcccagctactcaagaggctgaggctgggggattgttcgagcctaggagcttaaggctgtaatgagctgtgatcacaccactgcactccaacctgggtgccacagtagaccctatctgttaaaagaagaagaagagaagaagacgaagaaaagagcagggaatctacaaaagtcaggaatggatctggggtgcctctttgagagcaaaattcggatttcaaggagttctgttagaatcaacaacctgcccagggtcagtagtttctctctgatataaaacagtccatagaaaggtcattgccagctccaggagccagacagtaagatctcaccaagtttcactataaaaaaagaattctagttagagggctgttgcccaatgcttcagtgcatagaactacgaggctgcttttttttcttactctgatgaaatacttttaagtttaagaatatcgaattgttttctcttatgattttttatgctataaaaaccctacaatttgatggaactgatctgactgttggttctaacattttgtgtggcgcacctcctcctcctcctcccgtgtggggtcttcccttatctctccacatccaatctcttgactctaattttgctctacttagaggactcaaaaggaaaatcacaagcattgtgtaccttctcttcattatgttcacctgttttctttagatctaacatatgtaggtcagctcccattttcatattgcttaaaataactcgtttagtctccttgggcaggtcaacacttagtcttgatgctgatcttccacttgtgagtgagatcaaagcatttccttgtatatgatgttatttaatcagctccaaattcctctagaaaaggccttaaatgctcctgtttattcctcttatttcagttcattttatgcagcttcaaacacaactgacactcatccaggtccatcagtggacaataaaggtcatggccggggcaccaatcatcacctttccagtcctccacgtggacctgggcctgcatacgttaatcttttcaattttcttcttgatttagtggaagcagtcagagcaaaactggcctgaacattggctgcaaagcttcctcacagaagttcaactatagtgggcaagtggctgcctggactccacggctcagttcaccaaaatccgtttacaggagaaagggcctcctcagcgcagtctcagagatggagaatctcccttatgcagaaaagacttcctgagctgggtatgctggttattgttggcatctgttccatgcattggtgctgctgggcggacctctcccccaagcctctatctgtacacgctattgtgtatctgaagccctactagtcttggtagagcagagtggttatgaagaggcaggagctttcaaattcaactatctctggcactttttaactgggtgattgatcttgggcgcatttaactcaaactctctggacccccacgtattcatctataaactgaagataattaaagaacctgttttatagggctgtcatgagaattaatgagataagctacagcaagttcttgttacaatagaaagtacaaaatccagcttgcattttgttacttactaacccaatttgttatttattcacccaattgtctgagctaacttctgaacctctgtaaatattcgcttctctcttcattcctgctctatttatctaattgtccctattttctgttcatctttatcatagaaaatctctgtaatccatcacctttttaccactgggtgggaatcaggcctcaccatgtctgtgggtcctgccttccaccctctaccccttctctgtcctgtctttctcagcctcattggagttgttttctaaaacacagaattggtcatgccgaattggacaacaaactttctcactgtgagatttcagaaggggaaattggaaggcaatttaccaattgttattttgatgaaacgcccccaaacttttgatttccacgggtgtttcattcacagaaagtctcattatctcaagcctagtgtactactgttggatgcatgttacctttatgtattatgttatccaacaacaatgcaccgggcttgagataatgggttttatgtattcctagagggtactggagtaattcttagcggagtctatttgtgttgacacttgtcttttgctaggatacagaatctacagatgagacatacattttctggagtcatatatactttctcacgtgcttttgtcatttgttcccaatgatatctttcagtatttttattgattttgttggtataatagaatgttttacattaatattatgtcagtgattattatttattaatttatataattagtatgatgtacacatataattagtatgatgcataataatctatcatatggatgtgccataatttttttaacattaccatattgttgatcattaagataatttcagattacctgatattatgataatgttgtaaatagtagtgttgttcataattttttgtctatgttaatgattattttcggaataacttattgacaaatattaaccaaatatttaaaccttggtttaatgaaaaaattatttcatgtcagctaacagtcatgttactctcctaggtagaatgttgatatccttttcatcaccatgaactaaatccagggcccattaacatggcgtccaaggtgtgttatgatggatagtccagtcctctctttcatcatttcactaacgaggacttttctttcttgttcatttcctggattttcccccatttaacatcatgacattttcctatgccattaaaatttattgtaaaatgtcttttccttccttccttccttctttccttccttccttccttccttccttccttccttccttccttccttccttccttcctttctttctttctttcgttgttttttgatggagagtctcactcggtcacccaggctagagtgcagtggtgcgatctcagctcactggctcactgcaacctctgcctaccaggttcaagtgattctcctgcctaagcctcccaagtggctgggattacaggcacacgccactatgcctggctaatttttgtatctttagtagagatgggggggtttgccatgatggccaggctgctctcgaacccctgacctcaagtgatccacctgcctcggccttccaaagtgcaggaattacaggcatgagccattgtgcccgacctgaaatgttattttcatagctgcataataatctatcatatggatatgtcataattttttaacattaccatattgttgatcattaagataatttcagattacctgatattatgataatgttgtaaagagtagtgttgttcataattttttgtctacgttaataattatttttggaataacttattgacaaacaaataattcttacaatagcaactgatggcagactgcagtggggcacagatgtatctgacaacaaagagaccctccagtggggccatgcaggaggagagacaagagaagacaggggacaagtctgtgtcaatagcttcccacccataattctaccccctcatcccccatccctgaagctgagttcctaggtgaactgaggctgtcctttcagtggtcactccagaaacgaacctggttttggagtggctgaatggccgctgccatggtctcatactgaaggatttgatggggccactgtgagatccagtacattgcccttgaccctttctgactctgatttacatttttctacttagtgagtcttttcttccttcccttcttcctttcctccttttctgcctcctggtctccctacccccatccttttaacaaacatggacctaataagtgcttagcagtgtgctaggtagaggaacccagatataaataagacacagcccctgccgagaggggtgagcctcatcactggcaggacgcagtcaagaatgcctgcttccacccctgactcccagctatccctgtgctcgtatcgccctatgtcctcttcctttggggtagctacactatcaataccccagctcttcccctttgctttactccaagatgagtgagtatccaagttattgttgccactatgaacatcattattaataaactaaataactatatcagcattaccaacagtgcaatatccccctctgccacatctcacagtcattattatacctccttttattatttctccacccaggagctgttcagacaattaaaatccagtaataagaacaaagaataattaaaataacaccaagaacaacagaaatgtgatgacaaatactgaaaaatctgaggaaacataaccaaggggctaacttcacagtgacaggtgctaacaagatcaacgaggaatatgtgacaaaatccttcctgagaacttgaaaattctttccatctgactcaatggcctttttgccactgaggtctccagaggtgctagattgtataacaacttatttagctgatcctgccaaaaacgtgttgcaaggcggaggggggaaagatgaggaaaagcaaacgttttcataatgaaagccaaactgaaaactatttctcctctggctagatgttggcaaagctccaaggcactcttcacagctgcccaggtcctggagaaagctttgtggtatttaaatggggttcccacttcatttcccccatcttctatgctcgcttataggttttgaccctcagtgcctccatcggaaacatagatgtaatgttcagtatacagttcacgagaaaagccaagtacaatgtgtttttatatccaaaatatgcaatagagaagtgacagtcattgtggtgtagttaaagtcattgtgatgaaacacacaggtgtgaaaaaccagggggatgtgtggggttgtattgtctgaaacaaaatcaggtggaacaaataagaaagagctagaataggctagtcttgttccacatatgccccgacaaagtgtttttgagtttgagcaagaatacatcactgagttctacctttgatagatgctaaaccgccacctgtgtttccatggtgttctgtggttttgttgggtgcttccatgccccttagctcagtcgctctttccatggttccttcagcaaagatcgatgtgtccaggcccacactgtggtggaaagaacacaggagtgggagtcagaagcctgtgccgttccttagatttccattcataaggtgtgtgtgtgtgtgtgtgtgtgtgtgtgtgtgtgtgtgtataaaaaaatatatggagtcttgctttgtctcactgcaacctccacctccctgttaaagagattcacgtgcctcagcctcccgagtagctgggattagaggtgcacaccaacacacctggctactttttgtatttttagtagagacagggttttgccatgttggccaggctggtctcaaactcctggcctcaagtgatcctcccgtctcagtttcccaaagtgctgagattacaggtgtgagccaccacacccagcctcatgagataaatattaagaaacaaaggcctaagaaggtgacttgtccaaagtcacctgcctcagtggccctggactccccgaaccttctacagctagtactagaatccagtgttagttctacgccatcaagctacttggtatccaaaatgtcatggaagtagtcacagctctccttcacacagtcatgggcacctctccctgccttccagtaaccctccaggcttcttctactgctggggaaaatgttcacacattcaaaagtccttagcaaacacagtatagtaggtgcctctaaaaaccacattatctgtctgaggtccaaactcttctccacttacaaagctctgtggtgcccggtgggaggcgtagccctttctgccctttctgccaatcagcccaaattcagctgcttctcaaatggatctcactttctgttccatcttatttgacacttcatcagctggagatggctcagagatggtttaatgttagctccatatctgccaaaaacctctcactccttggcaaggcagccaaggacacaataagagagaaaaagaggtagatgatgagcgtaactcaactttggtaaaaatagtgcagacatttccgcagcttctcttagggtggcataaggggagacgagggagacagaaagggaaggatgaatgaggagagaggtgtcatccctgcttccagcctggaaggagcttcatttatctgcgttgagaattcagtgttgatccatcacatttgcacatgttattgtcacatacgtttactttaaaacatgccatccttaatggaggatgactatgcagggagcaatgccattgcaagagtctcatacagtgactctcctcagggggcttagaatcatgcctgctccttcataggcatggcggtgctgtacatttatttagcacgctgctacttctggatgtcaagctgtcaggctaatggtgtcaagggcagggagggaatggacagttactgggttctgatggatctggcatcttgtgaggcatcccacatagaagagctcatttaacggaagagaattggtcttgtgaggtgagctccaaccactctgtgcaataaaggctgaggaaggaaacaaagtggctggaatgattccaagtgaattggaagggtcgaagcagagccacagatgcagggatggtggatctcacctctctgtcttaaaagaaccaccttcagcctggaccacaagcagcagagatcaagaagaacctttgttctgaagttcagttagcacatttgttccacttcccttctcagtagaagagaaaccattcatgttatttgttttactgtatgtctatttttatctggtataaactgtgttgatttttcggcattttcttatttgttatttcatttgccctccagaactcagcagagggcaccaaacatcattttacttcctcctccctgtttctgggggaagatgaatagatctgggttttgcaatgtccgtgctctctgctccgtctcccttctctctttcgccttctttatgtgcctctgccttctcgcctaaccttgcctctgcaaatatcttccgcttggaatccgactcttgatttctgccctggagtgagcaggaggcaggatgggggtgggtagaaaatattcccactctcctcaaactctgtcaaaaatataaatgcccagtacaaggttgacaccgcgggccccaggttgccattctctatattttccttcctttgtcctatttggtttctgaagttaaatggtctcttttttgatatgaaaattaatttctggacaaaaagaaatatgcctgcacaggggccaaatttgtgttgtctcccagcacggctgtaattacactgtagatcaaactgacgccttagttttcagtggcttttttccctctccgatgtccctgaagttgccaggctcaccaagagcagcagttttcattagcagcaaagccaggggatggggatggatggccggggccagccctcactcctgggtttctctcctcaaattcttcttttggatggacatgtgcaatccaggccaatgcagagaactgcaggactcagggtcctgagttgcttgccacagtgtgggggtgaatggcggtggctctggggtacccctcatcctatgggtttcaccctgtggaacaggcactaccaggcttctcttttaagtgtcagacacaagaagggtctcacacatttcccatggtctctacacatttcccattacctttgtgcccagcagaaatctgtgttcacctgctaaaaatggtcactgtgaattagtatcaagctaagaacttgtgaaatagggcagaaccaatgcaaaattttccggagtcatgaaagtgaagtggcttttacactgcattcaatattgtgagttctagaggaattttcagggaaactgtggctcccttcttatcctaactttcatagtcaattctcgattgcccatacatagctccactattgtttgttgggtataattagacactatgttctgtggccctcaggtggacatctatgctttgccaataagccatgaattactccccagagaagcttatgtgattttgacatctacaaggtgaatgcaaactatttattcacaatgtgatgggcattccttcaatttccctataatatgttgaatgtaaatgatttgtacgtggagagaggagtgcttggtcagacttcatatgtcagaaagtcaacctgggtggtgtgaacaactcccgtcaaatgagtcaaagccccagaatgagattctatggtctcttggattgaacttggggccaagggatgtgggctttgatccctgcagctttgtcactggccctgagtggccattcatctaatttttccatctgccaagtgaagcaacaatccctcccactgccaagcttacagtcacattataaagatgattgagattccatgcctcagtggacttcaggaggaaaagtgttaccctctaaatccttcctcacactcccacacccacaagttttctttttttttttttaaagagtccagtgttaatagtgttttgactgctttcaagatatcaaaacagcttttgttggaatgaaataaacaaaagaagatgggttttggaacagagcattttaaggttcaaatttcaactttatcacgtatgagtattataagtcagttactcacactcttggaactttattttcctcatctgaaaagtgaggataataatggctcccttgaaaggccgcagggataatgagctgccattattgcatcagtgcaattccagcatagtgagaaaggtttgtgtctcttagctgctttctgaccggatggcaagcctctcctcaccccacactggccgccgttggcatacctatgtgcatgctctgtcctccgcggttcctgtggagaactctaaaagtcagggaagctcagtgccacgttttggaacttgtcagccatagagcaacctacctatttacttccagtggatgaatgggaaggtattgctgtatcacataaggactctcctagggagggcagtgttagcagcatgaaaagagggacattccagtgtcacacaaagtcccagatgggaaacggcagttgccaaaggcagcctgaagtgctgcgttctcttcgctcttcaaatgcagacaggtctatagcagcagcttgaagatgaagaccctggaaaaccatgagcaagggggcctcaaaatgacagggaaacaccaacaatgaggagggagctaaacgcacagtctcttacacccaggagtgtgattatctgacattttggtttaatgaaaaaatcaatagttttggagccaagcgtgggtttgaagcttcgctctgacactttactgcgcagattgctgagtaagttactttggtcaccgactctcagttttcttatttacaatactgggataatgcctcactcgcagggctgatgaatgagatcacagtggtgtggtggaaagcatgggctacgttgtaagagtgtattcaattcccagcctcactggttacacttctgggtctttaggagagctgccggcatccatgtgcctcgatttccacattgtaaaataagggtaataactgttgcctgtctcaaggggtgttgtgagggttatgtatggagcacataaggagtctaaggtgcacaaaatgaatactcacaatgaacgctcaacaaatagttccatttttaaattaataaatggctgttagtaatattattattttattagttttagcttattatccacaaaatagttcttacctactaattggacaagggtaggacactaattaaacgatgtgtgtcatttttgatggctcacactaaaatccatagaaaagtgtttattttcttcaattttttttcttgactctggggtttctgtccttctaatccatgagtctctctctgtctctgtctggggtttctgtccttctaatccatgagtctctctctgtctctgtctgtctccttctttcctctccatgcagtaaaacagagctgcaggcagtcaatttcgagtcagtgggctgtgaaaagcagttagaataatagtttattgaccctgaatgtggcagctggaactgagggtcggctgggctcaggcacagtgtaatggtcacaatagaagtttgatcatctttgatcatttccttggactttaagagagaaggtgttgccaggcatggtggctcacgcctgtaatcccagcactttgggaggccgaggcgtacagatcacaggtcaggagtttcagactagcccgaccaacatggtaaaaccccgtctctgctaaaactagaaaaattaaccgggcatggtggcaagtgcctgtaatcccagctacttgggaggctgaggcaggagaattgtttgaacccgggaggcggaggctgcagtgagaagagattgcaccactgcactccagcctgggcaacagagcaagaccccgttgagagagagagagagagagagagagagagagagagagagagagagatgttttttggagcctgggagcacctccaaatagcccaagtccaggggcggtagcctacccagaaggggctgggtttggttggaaggagataagtggaggagggcaggatgagggcctgagttctgtaccacttgtgggagtggagccttcatcactgggggtctgagtgcctgagcacgagggatgctgatccccatttcaaatgtgtcccaagcatagacatgcgctctgttttctcagattacctttggaagctggacttttctcctaagcactgcagtgatatgccttcttattcactctggtgatcatggattttccggtagaaatgtaattataaataaaaagtacatcttcaaactactttaatacttccatattagaagcaatttgtttgtaagtggaattattaataaaaacatagttgaaagcagagactaaggaaattcaaagagaaagaggagaacatgaatatataaataaaggatggcctatatttttacataatttgtgaattaaaaaatagaaatgtattgtcatagactgtataaactcatgcttccttcgatagctcagctggtagagcagaggactgtcgaagacacggaatcaacctaaacgtccatcagtggtagattggataaagaaaatgtggtacatacgcaccatagaatactatgtagccataataaggactgagatcatgtcctttgccggaccatcaatggagctggaggccattatccttagcaagctaacacaggaacagaaaaccaaataccgcatgttttcacgtatgagtaggagctaaatgatgagaacacagagacacagaagagaacaacacacactggggcctattggagggtggaggctgggaggtgggtgaggaccaggaaaaataactaatggataccaggcttaatacctgggtgttgaagtaatctgtacaaccaatccccatgacacaagtttacctatgtaacagagctgtgcatgcacccctgaacttaaaagtcaaaagataaaaaataaaagaatacataaactcaaaatgtgtaaattctgggcaaattttgtcatggcctttggaaaacatttccaaacaataacttgttactttattttacaagtcacatgtttatttcattgctcgtgttggaatttattcattttatgatcctttggttctatttatattgtgataaagactataaaaatgactttttttttctttttgaaagaaatcaccaatacagataaaaagcatacaaatatcatttggtatttgtaatctgaattatgatacagtttttctattggactggaaaaataacctttgtgaattacatagaatctatgattttaggcaagctgtttccagtattaaagagcacttatgtcaattgtaatatgttgtgagttatttgttttcatttaatgtctttttatttaaaatagggaaagtctggtaaacaagctgctcaactaaaattaaaaaattttcttattaaataaccaatgtaaatagaatcaaatgctatgggagaaacagaaagaaagcataatgcatttaagaagaaaagaatctaggtgaagggcaagaatatagaaataaaatcatattttgtttttcagaacaacaatgcagcaagtgtacacattaaatctgcatgaactgaatgtggaaacgcttgtctactgaggagataagtgaaggggggcctcttaaggttgacatgagcgcccaatagattcaacttcacttttatcagctgttcatgcatttatgtcaaccacctgaggtctttagctttgtttgattgttcagttcaattattgcaagaaaggagttcagaaaataagctttatttatttttctctctcataatgtatgccattgtctcaacaaaagttgggactttagacatatatttaacagacctgaacacaaagacttaacaagttgtttctttattattaaccctttcctaattgtgcatttcactggttattgttaatggttttttttttttcaaattttagagataataattcttgattaagatatgtccatttccagtgtctggtagttatttaagaaataattttgatagagataatatagaagtggaaataaaatgtagaagcctattgtgaagtttatctttagaaagttttcattaaaaaacttattttccagaaatcagatgtggtgtgtttctgcaagaattatgaaacaaaataaaaccaaataaattataccactagaaccttcatagtactcttcctaaaaggaataattcaccatgcatattttaaaagtgttcaggatcatagattcaattaaatttaattgccatatgtggagttcctactaagtggtcggccagaatgaaggcatatcaggcagagttatgacttaccaactctgcaaatacacctgcaagctactgcacctgtggctttccttccatagctcaaggaaaataggcaaaaagcaataagaataggaggtcgtgtgaaacagtgaaagcagccattcttattcttttgaaattgtgtacatccttcagcataatacagacaaactagagttttgatgtatccagtacttgggagaagagctattgtatccagtacaattccccaatgcatattttaccatttagtctattcattctggaacctggaccaaatgtatactttgtggttatttccatttttcttatggcatattgtgataccaataatctatcatcaaattagttcttaagatgagacccaaatgaccatttatgctagaaactcttgatattccaaaattagcccatacttgagaagcaggtcctattttgcttcctgtctttggggacagcaactttctctgtaacttgaagcatgtctcttaacctttcctgatttccccatctgtgaattagaggtaattattcctaattttaaggagccattgagaggattaatttgttagtgtttgtaaagtactttagatatgtaaagtgctaagtattactaaattccatacaaataatttgcaatttaacatctaaagggactgaataattgactttattcttgtagactatattcttataatattttagcaaatctgcaaatacatgtttttcccatctaacatttgtacagagattattattgtttgtaatacagaacatgcaaatcaacccctccttcctactcaagttaataaaaacataaaaggaatgactgtcattagaagcaaagtatcctgggggaaagtatctcccaattttaaaaattgctggcaattcccttttcaagcagtctgcggaaaagctgtcaggagaggtaaaaggaagaaagaagaagtctattaaggaattggatatgggttagaaaattaatgttttttttaaaaaaaagatgaatttcctaattgtgttgttcctggactctgaaacaattttagtaaacaagcacaagtgtcctctgcagttatttaaggacagactacatacttaccctcaaacccagtttattcaggatgcaggaatagaatatggaactaactggactctccttagccccaaagatgctcaaatcccagttgttgtgtattcctctgacataatcccaccacaccggtgtgtcagtgcagcgttcgtatcacatctgaatcgctggataccgactaaatattagacagttgtgggctgctagctgcatctgcatttacctcctgggcaaatgcaagcactttgagtgctgacgcagaagggttagacagagctgcaaatggtgattcaactggagccgcttgtggtgtttataaagggatgtcagtcctaaaacaaactctgacacacagaggcctggacttccactggggttgtgctgacttgctctctgattgatggtgctaccagaaaccactttatggagttatagccttgggtgacaatgattatggcttgtaatactggggctgtatttcctcgagctttccctgtaggacttggagggattcctaaagagaacagaatgcctgtcccctacacagggaatgaggaggtgccattcagggaggctgagccgggacaggtgaagggcactgctctcagtctcctcatcttttaactggggagggttatcaaaacctgccttgcaagatgaggccaaagtgatggaataacttggaaggtgttgaaaagtgtaaaagccctgtgcaaacattgtagtatcagaatcgctatttttgcttgatcggagccttttccctggcttagtacagctttcggccccatcattccgccctcatcttccttggtttccgaattactagaacaaggggtcagtgacacatattgaaaggatcagaggactggagttgaagtcctgactcatcacttcctgagttgctctcgtggccttagccaagtcacttcatcttagaaattccattttgttacttgtaaaattggggcaaaatatctaacctatagtaggtggtgagaaaaaaaaatgagacaaatgagacatctattttattataaagcattatacaaatatgttaggatgattataaatatttcttgggaaatatttctagctcttagggaagctaactcctttacagagaataagagaagttgtagcactaaaataaatccttttcagtctgcaaaaaacccctgtttaattcaccgaaagaagcatttcaaggaaatatgctcattctccagcctgtgtccctctttctgctgccccctttatcacgtgcgctggtgggaggctgccaacaaaagaacagggccctgtgaggggaggcaggggtgttcccaaccctcagcctggccatcgtccgtctgtccaggaatgtttcctttaccctctttgtgggagtcgtcatcctctcctactgccatggatataatcagaaggaccgtgaaggtagatgtggtggggaaaacaacaacaaaaatcctcccgccgaaggtgactttcagggctggtgagatttaattcatttccctgtggcaaccatcagggacggacatctttcacgggctggttgggtacatttcttacatgctggcgggatttggacgcatgctgtgccgctctttttcaacgccggaaaagtaaaacattgcccaatggggagctctccactgacttgtgtgtaggaaaatgatgtagccaaattggtgtggcggaagttttacagagaggaaagcaggaagcggcaaagagaaggaagacagatgctcatgaatacgtttttccattatgttcccaggcactaagtttgcctttcttgatccttacggtataattttccagatcaagataagcattaagcatgttgtctgtctcctcctgtacaatttgcagtttcaggttatgctcagattgatagaactgtgagtatgcagagacattaataagcctatgcatttaaataacctttatcttccaaggagctcagttttataaatgatgggacattgctatttttttttcctgcttcatatgcttggcatttttataaaactttgaatttcagtatcatccttcatgagtctagtgtaccctccgaaaaaggcagcgatgtcaacaaattattataacaatgagtcagtgataccgaaaagaatcagaggactggagctgaggtcctcacatgtcacttatcaatttgctgtagtagtcatagccatgttacttaatcttagaaactcaattttgatacctgtaaaattggtgtaaaaatatctaacatatacctttgtggtgaagaagaaaaatgacatacatattttttaataaagcattctgttatacatatatgttaagattatgataagcctttcttagaagccactgcataccttaggagcaatttattttttatactaatatgctagagggaaactaaggcacagatggaaaatgtgcttctcactactacaatctataaatcaacaactccccaaactctatgtgcagtcaaactgtcctatgaacttacaactcactctttgaattgccagctgaataacccacgagcacccaagcttagcatctcttctgaatttcctcacaatcctcctcctccacctgagtctttctgcagaagctgttctctcttccagttgctagcacacatatctgtgcctttgggttgtgtctcctaaatctttctcccatcagccttttgcttgccattcaagctaccaacatcttaatgaagttcctcctgtgtccctattaaatgcaatagctttgtagctggactctcggccttcgttgttctccttccatacccctgaaatcatcttccacatctgagatgagtggtgtaaataaaatgcaaaataaaccatgttgcttctaaatgtcaaacagttctgtggggccacatggaccataggatgatctcaagcttttctggatcttgggatccagagagccttgtatcacatgacttcttaaatgtctgccactgccagtcctgcctctcactggaactgccagcaacagcaagggaatttcctgaaagctccatgcaattttttcatgtctctgccattgacattgtattgtctttgcatagaatcccctccccgtgttccttagcttgacaagctcctcgttatcctgtgatcccaggaatgtctccaccaggacacaaccaacacatcaccaccgtgtcaccatgactgacaacaggccctccactgtactcgccgggcaccacatagcacctgccattgtgcattgtgacttcagtattacctgatacatctttcttagcagaatccattacttgtgtacaagaagcgttgatggtactgttcatatgagataaaggtgccataagctaaatgtgttcaattaggtattagaattgtacatgcttggtcatatagtcactcaaccaagtctgttaagggtttactatgtgccttatattctagtaggttctgggtattgtagtggcaaagtggttcttggttaggcgtccaggtcatgtatcatgtagtacatgacggtggacacacacttgccacgcagtcaccaggactgtggacattgtctgaaaatagtggcagagcagcagataattctggattctcaccggcaggggtcagtgcagctaagcagacgccgcacagccggctaacttggaaagacattaggagcttggtcttgaattaataccattctaaacgttttctatttatatgtgaaaattcacatttctttgccttttgggaccaggctagatctattcattctcctttaatggctttgtaaacactgtgccttccatgacctgccccctcctccctgtgcccatccactgcctcttactccatgaagtgattttattttgaatgtattcgtttcctataagaagagagcctctgagtgaatcacacatcggttcaaatgaccttctgttttgagaatgttcccaggggggtgcaattcttttaatttatttaatccgatgtgctttttcagaatggctctcctctgcaaaacagatgggaggggactgcctggcactacttctctttctctccactaccctggaggcttggcctctgggcagaaagcttgcaggagtgtatgggactggacggttcccagtgccaggcggccctgctttcctcacagcatgggggcttttgacatcagaggggccccggctcggcctttctcttgggtgtacctctgtggcctgcctcctcattttgttcacacagaaaagaaaggacatagagtagcatatgtcctcagcacttagatcatgaccattgcacttaaataatcaacactctttgggcactgtgataaatcaacagttgaaacaggagtgggcactggagaagctacaacagatgcagccaactttacttccggatgaagttgttctgaatcaactcagtactggaaatcataaagtgatcaggagtgtggcagtacagatcacagggacctgggtttcaaccctggcttagccacttcctaagaatgtgagcttggaccgatgaagatgtataagccacactttcctggcatgtaataagggaatgatacagatatccactcccagggctgctatgaagaggaaatgacatagagcttacaaagtgctcagagctgtgtctggcacagagtgagcatctaaaaatggcaagaagaatgcatgtcattatgacatttacaggctatatgctacaggcaaatcattatttttcttttaataattgaaggaatttgacttgttaggtggtccctaccttgatcccttagcccctgggacacacctctgttgttgacgtatgtccctgcattgtcactgtttttttgtttgttttcttttgttttgtttgacatggaattttgctcttgtcacccaggctggagtgcaatggcatggtctcagctcactgcaacctctgccttccaggttcaagagattctcctgcttcagcctcccaagtagctgggatgacaggtgcccaccaccatgctcagataattttttctatttttagtagagacagggtttcactatgctggtcaggctggtctcaaactcctaacctcaggtgatttgccctcctcagcctcccaaagtgctgggattacaggcatcatcgttttatgtagaggataccaggacatttccctgtcagctgtgcagggcagacaccgaatcttaaacatttctgtgtttctcgcattgggcagagttcctggatgcagcagttgctccgagaatgccagatgaaagcaagctgggcatgctgtctgggaaccctgtgagccttgggtttcccctgaccttaggtggaaagccattaggcacctgcttacactcaacggagagaaagcactcatcccctaacgttatcatttctctctaagtctgtctttccaaatacttaccttgcatttattttagagagagaactctttttattttattcctgagattgggtgttgccacctttgtccaggatctacacatctgtgtgtggtgtccctggatcctccttggtgtctccttagagactctaagttatggccttcagtcacatgtacattgccacatacccatgtgttttcattgccaggcaaagtgtcattctggcaacaagctcctcacctccttccccagagcttgccacactggcctgccataacagttactggagccactgcagggtgcctggttccaaccaccatacaggtcttttttctctccacttggtgcctccatcagaccaattgctcaagccagagaccaagtggcctcctgaccaccccctttgctacaatcctggcatctaagtcattattaaatcctgttgatttcatctccaaaatgcatcttgaattttttcatttccgctttccaccacagcccaccacttggtcatttctgtgtaaccacagcaatagactctgactagcatctcactctgccatcatctcagtcactctcattgctggagcctaggtgagattttgaaagcctgaatgagcctgtgcttctcctgtttacctagcggtgactttctattccactttggatccaatcctaagcgcttcccaggccttgtggagctctgtggtgtccggggatgcctgctctctctcctcaccacaggcctcctcccctgcctcggtgtttccaatcccaggggcctgcatccaggctgagaggacagcattagcccacctccaccctgagactcccacatggggctttttctccatctggaagaagcctccactcaccccacggccactttctcccaccctcctaatcactcttcaggccatttgggatgcccttcttattgcctatcccctgatatcctctctcagtgtgatctatttattttttaaattatacttatgggccaggcaaggtggctcacacttgtaatcccagcactttggcaggccaaggcaggcggatcacaagttcaggagattgagaccatcctggccaacatggtgaaaccccgtctctactaaaataaaaaataaataaataaataaataaaaaggctgggcacggtggctcacgccaccgtgtaatcccagcacttcgggaggctgaggtgggcggatcacgaggtcaggggatcgagaccatcctggctaacacggtgaaaccccgtctccattaaaaatacaaaaaattagccgggcgcggtggcgggcacctgtagtcccagctactcgggaggctgaggcaggagaatggcgtgaacctgggaggcggagcttgcagtgggccgagatactgccactgcactctggcctgggcaaaagagcaagactccgtctcaaaaaaaaaaaaaaaagaaaattagctggacatggtggcatgtgccagtagtcctagctactcgagaggctgaggcaggaaaatcgcttgaacccgggaggcagaggttgcagtgagccaagatggcactgctgcactccagcctgctgacagagcaagattccgtccccccctcacccccccccaaaatatatacttattaccatttgtagctatataattatactcatgtgtttgtttaacatctgcctcacacatttgattataagctccataacgggccaagatcatatctgtgacttatatctgtgacttgccattttagactcagtggctgtagtgtgatacctgacacgacactgatgctcaaaaaattgcttcataaatgcagaagccaacattgacgtaattttccagaatattttaatactcaattgacctcagggaaatgcaaaccaaaaccactaagataccattgcacacctatgataatggctagaagttgaaagattgatggtaaccaactgttggggaggatatagagccactgtaactgtcacacactgatggtaagaatggaaaatgctagaaccactttgaaaagttgtatgttttaaccccatcaaaaagtgggcgaaggatatgaacagacacttctctaaagaagacatttatgcagccaaaagacacatgaaaaaatgctcatcatcactgaccatcagagaaatgcaaatcaaaaccacaatgagataccatctcacaccagttagaatgacgatcattaaaaagtcaggaaacaacaggtgctggagaggatgtggagaaataggaacacttttacatcgctggtgggactgtaaactagttcaaccattgtggaagtcagtgtggcgattcctcagggatctagagctagaaataccatttgattcagcaatcccattactgggtatatacccaaaggattataaatcacgttgctataaagacacatgcacatgtatgtttattgcagcactattcacaatagcaaagacttggaaccaacccaaatgtccaacaatgatagactggattaagaaaatgtggcacatacatatgtagaaagctgaaactggatcccttccttacaccttatacaaaaattaattcaagattgattaaagacttaaacgttagccctaaaaccacaaaaaccctagaagaaaaccgcgcattaccattcagggcataggcatgagcaaggacttcatgtctaaaacaccaaaagcaatggcaacaaaagacaaaattgacaaatgggatctaattaaactaaagagcttctgcacagcaaaagaaactaccatcagagtgaacaggcaacctacaaaatgggagaaaattttctcaacctacccatctgacaaagggctaatatccagaatctacaatgagcacaaacaaatttacaagaaaaaaacaaacaaccccatcaaaaagtgggcaaaggacatgaacagacacttctcaaaagaagacatttatgcagccaaaaaacacatgaaaaaatgctcaccatcactggccatcagagaaatgcaaatcaaaacaacaatgagataccatctcacaccagttagaatggcaatcattaaaaagtcaggtaacaacaggtgctggagaggatatggagaaataggaacacttttacactgttggtgggactgtaaactagttcaaccattgtggaagtcagtgtggcgattcctcagggatctagaactagaaataccatttgacccagccatcccattactgggtatataaccaaaaggactataaatcatgctgctataaagacacatgcacacctatatttattgcagctctattcacaatagcaaagacttggaaccaacccaaatgtccaacaatgatagactggattaagaaaatgtggcacatatacaccatggaatactatgcagccataaaaagtgatgagttcatgtcctttgtagggacatggatgaaattggaaatcatcattctcagtaaactatcccaagaacaaaaaaccaaacactgcatattctcactcataggtgggaattgaacaatgagaacacatggacacaggaaggggaacatcacactctggggactgttgtggggtggttggaggggtgagggatagcattaggagatatacctaatgctaaatgacgaattaatgggtgcagcacaccagcatggcacatgtatacatatgtaactaacctgcacattgtgcacatgtaccctaaaacttaaagtataataataataaaattaaaaaaagaaaatgtggcacatatacaccatggaatactatgcagccataaaaagtgatgagttcttgtcctttgtagtgacttggatgaagctggaaaccatcattctcagcaaactactgcaaggacaaaaaaccaaacaccgcatgttctcactcataggtgggaattgaacaatgagaacacatggacacaggaaggggaatatcacacaccggggcctgttgtggggtggggggagggggaagggatagcatttggaaatatacctaatgttaaatgacgagttactgggtgcagcacaccaacatgacacatgtatacatatgtaactaacctgcacgttgtgcacatgtaccctaaaacttaaagtataatttaaaaaaaaaagaaaaaagaaaagttgtatgttttttccttataaagttaaatacatggggctgggcgtggtggtgtgtgcctgtaatcccagcactttgggaggccaaggcaggcagatcacttgaggtcaggagttcgagaccagcctggccaacatggcgaaaccccgtctccactaaacatacaaaaattagctgggcatagtggcgcatatctgtaatcccagctacttgggaggctgaggcaagagaattgcttgaacctggaagacagaggttgcagtgagccgagattgcaccactgcactccagcctgggcaacagagtgagaccccaactccaaaaaaaaaaaaatgctaaacacacaactaccatataacccaaccatttcacatcttggtatttgtctaagacagataaaatcatatgtctacatagagacttgtacacaaatgttcatagcagctttatttatattagccaaatttgaaaacaatccatgttcatcaacagatgagtggataaacaattaacagtaaatccaaacaatgaaatatgactcagcagtaaaaaggaatgcgctattgatacaagcaacaatgtagatgaactcacaccatcacgatgagaggaaaaggccagatccagaagagtacagatggcaaaactctacgattccatttttatgaaattctaggaaaggcaaaactaatctaaagtgacagaaagcagaaatgtgaaggtctggggctaaagagccttgggtattgatggcaggaagcatgaggtaactttctgggacagtgagagtgtcattctgatgagggtagtggttacacagatgtaatattcatcaaaacttattgagccacatcactaaatggatacattttattgtatataagttatacaataaaaattggtttaaaaacctcagttgaacacagcatggcacacaagttttgagtgtgtatgtatactgaatatttatatatgaaaggtacaatgtttcactcttggcctagcaggaatcccaatgaccctgggggtgaagactggcaagggagtggaagggagaacaatgaccttccccttgactgtattttcagtttaccaaagcaaagtgaagcttgggctcaagacattaagatacagatggaccgcatgcagggccaaaaaatactggatgaccagctaaattctaatttctgaataaacaataagtagttttagtataagtatgtcccatgcaatatttgggacatatatttttattaaaatatttagccatctgaaattcaaatttaactgggcatcctgtatttttatttccaaaacttggcaacttttccagcatggtgtattatcaccaggatgttcaaattcatgtgtggaaggattttcttttgaacatgttttgcattttataaagctattcacatagaaaatagggagcaacactctatagtgaaagtaatgtggattttagagtaaatcagaccttgattctaactccaactttgtctcctaattcattctgaagctttggccaaattgcttaacatgtctgcaaagtaagcataataacctctaactcaaaattttattcgaggagaggcaatagaagcattagcttccttgaatcaggaggactgtctgtctcctttcccactgcttctctgcattggccaggagatatcactgtcctaacttctggaaacaatttaaaattgtgaggcctggacaggagacaagagaagctccttgccagcattggctctaattctgaaagggctcctgggttgcatctgagctatcaccatcaataccccacactctcattggtgttagtgaagggcaggtgttatgtcagtggtggtaggaagggggaagtcatgtcatttttactgtctgctaatgcttcttaaggaaaagaaaggaggcacagaagtgaggaagaatagcggtggaggtactccagacaaattggaagggatctcctcttgttaaagaattgcaggcggggcgtggtgacacacctgtaattccagcattttgggaggccaaggcaagaggaccacttgagcccgggagttcaagaccagcctgggcaacatagaaagaccttgtctgggaggctgaggcaggtcaattgcttgaactctggagacggaggttgcagtgagccgagatcacgccactgcactccagcctgggcaacagagtgagactccatctcaaaaaaaaaaaaaaattagctgagtctggtggtatgcacttgtggtcccagctactggggaggctgaggtgggaggttggcttgagtcctggagatccaggcggtggtgagctgtgatcacagcactgcactccaacttgggtggtgacagagcaagacctctgtctcacacacaaaaaattgctataatcagggattatctcatctcaggaaaaagaggaaattatgttcaagatgaagagagaaaacgggctagtcatctgatttactttacctgaccataacacatagtcctagggtactgggtgaaatttatggccagtaaattcccagctattaaaaggaaacgcttctttgtctgctatgcagttgacctccgaggaagatcagtgaagcagaatcagggactatgtttagaaacgggatccagcaattttatgattcataaaaacttggctgatgatgtggcttagagcaagggcctcaaatgccacctcagagccctgagccacatcccatgccttcagcaggggcagcctgtctttgggatgctgctcctaattccatacattatctccttcaaggaaaggggcgtcatctccgaaacagctacatctcctttgtgattccagtttccacccaataggcccagtgcagtgactccagctccttccaggtagctgcagctcttgccaccagaaagatcacttctttctttggttcttcagtcttaggcctgatggagatgtcctgtcattgctaatctctgtgtagtctcatcatctctttcacttctctggaggctttgtaaccaattctcttaccaaattccttctactggagtcatgcatggactccaactgtctagctcttcaacgatataccaggtcacaccgttttcccaaggggttttaacctgtcaccctaaataggactgatatgtagctgcacagtctaggcaaacatgagtgaaagaagatttgggcactgattctcttcctgcccttctagaacccatttccaggcgtgttaggtccatattcaatgccaggtgagacggggctgagtaaacagaggtttccattagctcaggggaagtggaaagtatcaagccctgacatcgtccactggagacactgatgtgagttgaagttaaatcctcagatggttattattattatgtttgtttttttcttaacaggatgctattcccaaggtatacatataaaagcaggattcaaagtcatctaattattatacaaagaaacaaccagagtaaaagtagtgggatgaagattagtaaaatgtgccagaattgaggaaagaaacccaccccaacattagaatgcaaagaacgttttaaaaatgccattatggaaagtatattctagggataaaatggataagtagataaaagatttaatgtttagctattattctactaacttcaaattttcaacagaactccattgaatagtctatgtttctaaatggagcatatttcgaagaatctccagatggtcaccggacactacagggctccgctgagagcaagtagccttacttaagcaacaactagggaagcccaagatttaagttcaacagagactattttagtcagtttcactctatcctcgtcggtggccagtagtaagcttcatttaaatatatagctacaaatcataccattcttttcattttcttttttgatcctttaatacaacttctgtcttccccctcccccccgccaaccccgctagctaattgtagcaaactctgatgatgtgggctagtgatatggccatatttcatttctggcaaatggatgttatttacatttgaaaaagtgaaccatacttcactttcattatgaaacactgtcttcaaagcaacatccccaaagctcttttaatgagagaggagagggagtgagagactgtttcttcagcaggaaataactgtccccaaacttaccagtttggtatacttacagttttctgcctattttcttttctctctttctttctttcttctttctttccttccttccttcctttttttctttctttctttcttttctttcttttgagacaaactttcactgtgttgcccaggttagagtgcagtggtgcaatcttggctcactgcaacctcagcctcccaggttcaaatgattctcctgtctctgcctcccgagtagctgggattacaggcacacaccaccgtcccagctcacttttgtatttttagtagagaaggggtttcaccatgttggccaggctggtctcaaactcctgacctcaagtaatccacctgcctcggcctcccaaattgcgaggattacaggcatgacccaccgtgtccagccgtctgcatattttcttaaagcctgtaccggcctagatgattcatcaaagaagccgtgactctttgaacatgagtgggtcacccatttttactaagagaaggaaccaccctcaataactccatttcatctttgagaagtttggtctagagtcatccaaagaaaataaagcatacacttctatggatattatttggattaaattctttgaaaaccttcacacctttatgattccacttagaacatgctgccattatgagaaggttgacagctgcacacccctgtgcataggcaggattggagtcacacatcttactgtgctctccatactctggtactgttcacaggcatatttataagacctctaaagaactgcttcaggctttcagggaatgagaaattaattccgtgttcatcgttccaagagaagtatttctggggctgcaaaaccaataccacagaggatatgattgcctggtgttctggaacctgagagcaaacaaaagacaatatgccatttacacagctttgcagagcttattcaaacatgcattgggacatggacattttcattaagcttaccaacttttctttcctctctctttccttacctcttctctcttcctccttttttttcaactcatttggagaacacactaatatttgtaacaatgctattttcctggagtaagaaattcacaaccacatgaaacacacttgtaagaggttagagagaagccagctcttccgtgggaagctagttgcctgaaagtgctcaagattttttttttttttaatgattttattacttggcttgttagggcttattttcatagctgctaccaaactttataagaatattctttatccaggtcattaatttaccttgctgaaattgataatctaggaagccagaatccattgaaatcttgatcccaaatggatttatctcttcaggaagggatccaagtttcattttatttttagtgctttttaaggtattcttcacaggagggagagaacgatgtgagagtgttaatgaaaaaactaaataactttcctaacatgaacccatcatctgaaaagcagaacctaattttgaattattaaaggaggctggatcacaactcaccactgagaaatcgagggagggaaaatggtgtttgggaagtccaattatttctgaaccagagacagtcttattaagttgggcagaaaattaattaggctaattagaaaacctcattggaattcagcaaggagttatgagaagaagcatgacaacactggaagtgttgatagagggagaaggttctatgggagagaaatgagtttttccggaagcagatgcagggtgattcatgcatattgcggttgatcattgggtcacttcggatggaagcagcagcgtttttatagactttctgttcccagtggtgggtcttcactgagtattaaaaatgatgtctggtgtatgttgtaagggaaaaaagaaaaaaatccctgagatttattccaaggcttcagtgggattttatatttattttggtatttccgatatgctggttcatcagcatggcgcattgttaaaaagtgctgggtgggtggttttttatcttcacggatttatggagtccttaaaacatctgttccgttctgattcccccgctcagtacaaagacgttagtcaggggaagcatctcacactgcactgtttccacgcactgacgttggcagcggctaatagagataaccctgctgagacagtcagtgctgtgtgggggccggggaggggccggggttccatctccgggaagaatctcatgggatctgggccctgcaacacaagggcctttgaagtgagacgaggaggagcctcaggaagggtcgccggggtgactaaagaaacctgcggagggagctaaggaaacctgttccaggggacgttggagcgtaggaagaggactgtgcccacgatgctggagaatgatctccacgtccctcctaagcccctgtgacagtgacgtcttcctttctggggctctagggaaaggaggagccttcctagctcctgggagagaattatcagggctgctgttgtttttgagaaaatagctgcaacccagccaaaaccaccgggatggagggactcttaaataagatgtttctcatgtggggtgggcagggcaggggaagcggggaggacagaactcttgatgaaaactggtgccagactaaatcagagacgccgtgaaagtggcaagaggcagggaggagaatcgactttgcaggacctgttatgcgttacggctttttctgtgtgaacacatcctattcctcacagcagttcagtgtagtaggcttattagtcacattttacaggtgcggtaactgaaattcagagggctgaagtcatttaggatccacacctaacaagaagctgaaattaaaacccaagggttacagatggaatgttttatatccccctccccaaattcctatgttgaaggcctaacttttagcatctgaataatggtgtttggagatggggcctttgagaggtaattagggctaaatatagtgatgagggtgaggcctgcgtgattggaattagtgccctcataagaggagaaagccgggcacggtggctcacgcctgttatccctgcactttgggcggctgaggtgggcagatcacctgaggtcgggagttggagactatcctcctgaccaacatagagaaaccccatctctactaaaaacacaaaaaaattagccaggcgtggtggcgcatccctgtaatcccagctactcaggtggctggggcaggggaatcgcttgaacctggcaggcggaggttgtggtgagcagagatagcgccattgcactccagcctgggcaataagagcgaaactctgtctcaataaataaataaataaataaataaataaataaataaataaataaataaataataaatgcagaggaggaagagcgcgcatgctctctctgtctcctctctctgtctctctcttcactatgtgaggatacaatgggaaggcagctgtctgcaagccagggagagatccctgatcagagcccagccatgctggcatggcaccttgatcttggacttccagccttcagaactataagaaaatgaatttttgttgttgaagccaacctgtggttggctattgtgttttgctatagcagcccaggcggactaatacaccaggttcatttgttatcaaagccccagcactttcggcagcaccctagcgcctcaggagcgccctctttggtatctgaaggaaatggacactctttgcctaggttcccatgtggctcaatagaaaaatagtacaaagagcccttagaaaagttcctatggtcccaggattgtgggaattgtctctgcttatttggagaaggaccctattttcaccctcttctggggcaagataaaaaggatcacaggattaaagttgggatacccaggggtggagacaaaatgacgacagagggtttgagttctacatgttcttcatccccgtagcatagggacatggacagatgggcagtgtgggctgcatgcaggccaagggcaggttggcgctgaatactggaaaatgacgacccgagctggaggacctgaagccgggcagtctgctccagctccccaagtccagcaggtgtgacggccctgtcgcccttccccttccttggcgtgggcctctcctgaggccgtccttttccaatcaccaggtttgcctgtcaagttgagccaagtaacaagacaggagtcaatttgttctccccaatagactgctcctctgtctattcccagactcccaggtgaccccattatgataatgcccagcctgactgctcttagaacaggcctgatggagaactgagagcttccttgaaatgtgaatcacagagaggctggcagcccatggctctgtcccctgctggctctggacaggagccttctgcctccccattgtcaccgctgagcgatgccatgtgcttattcatgctgcctgctgctggcagcccgggaatgtcgcatcatgccatccattcaaacaacgggctcggttctgctgacacccagggagacaggcggattcagggtgtgaagtgtgttgccatcactttggcatcccaatctgaactcagtctttagagcaggggctggttttatggtcctcaggtaggggatggtgcccccacaccagatctccataaacacacctttacataaaacccaggcagcctgactgccaagctttggtataaaaaattagcaagtcagtcagtcaactggatatttgatttaacatcaaatattttagtctttccaaatatttggatatgttaatattatgataacccaaccaaagaaatgtggtgatgcaagattgagtgtctgaataattttcaaaacagtaatattctctaccctggcaagaactccaccccacgtgcacccactagtcattgaatcaatgcaggtcgttgaagagtagttatataacacttagccaagactaaagctaaattttgagataatttaaaacacagagattaaatgtatgccacacatgataagctgttcagtttaggggattatattatccaagtgatttatagccttacacaacttactttgtgtttcgggagtgataaaatccctatacatgtctgaatctagaatgggaagctgaagagctctgggtactacaaaccccagggatcctcattcccaggcccatgctgctctgcttcttatccacaggcccatctctctctcttttttttttttttttttttttttttggcattgcttaatgatttccttttcccctccattctgtacgctgctttatatagtgcatgtccctgtagttccaggataatttattatttaattatgtaaccattacataattcttcagctttagccttcaatgttttcattgttgttaatataactgctatcaagacatgtaagttttatttatcgtttccattgaggagcaataattatgtaactctgcaattctgcaacgattatttctatttgtttaattacataactataacaatattaaacctctaaaacatttggtgatagatttatggtgaagatgctaggagacagcaataataatgatgtatcagagtaataataaaactaaataatagcattaatattaatattaatggccataacagtaataagcggcaacattaccacttgctttttgttcacactgtatttggtctctttaatagatttcttcccaaatctctgtggttaattagctatataacatttggtactcagcagtgggtgcaacttcatttccagactttacctggcaaagctgtgctttatagaacaccagatggaaccggtctcttttgtccttttttatcaggcttggagagggcagatttccttcttcctcatgtcacctggggacttccatagacaggataccctgtgttgagagacacaggtgttgtagaatcccaagaacccgagatgtgtttggaaagcagctgtcgaactgttggatgagccgttatggtggagagagcatggggtttggattccaacagatctggactgaattttggctctgccactaactgggtgaccttgagcaaattacctaacctctgtggactacaattttctgatatcaaaaaaggggataattatataatacagtaatgtctgcattgcaagactattgtgagaattaaatacaatcatgtgtgcaattacatggggtataattgatgcctgttgacagctatgttttggagctaccagttgatgagattaatgggagaacatgactcgaagttgctccttcctataaatcaccttgtcctcaccctcccaggagctcccttctcacagatgccccagagacatcataacagttaaagagagctaacctctaacacaatgagtgatcactatgtgctggacaagtcacacacatcatctgattaaatcatcacagctatcctataagggagctgtgattatttcatccaggtgaggcttgagaaccaggaaccttagaagacatgccaaagttcttgccgctcactggtagtggaacccagccggcgcttctccagttacactgtgtactccctgcaggcgcacatcctgaaagccacttaaagaatgctctgtatgagagccgtcctcctgggacaaatccactccctgcttctcctggtgcccataccaatccattctccacagagcagccagcccgatcaccttaaaatgcaaagctgatgccattattgcccttcttcaaccctccaatggctttccgttgctctgaaagtaaaaccaacctcctaaatctaaatacctttatgatttgacttctgcatatcaaactcccctcctctcactcttcattacagaccagggcgccacaccttctgaggctacgccaggttcaacccccatctctctagggcctttgcactcagtttcctcttcctggaaatctttctatcttatcatgtagtatgtattttctatcttatccgcttatgtataatctcttctaggaaaattcccctcaaagcttcatgtaaatcaacccagccccatgtcctgtattcattagtacatgtcctacttatctcatgtataacatggaccatgtatacagccatcttccttattcttctgatcatttggctttatgtcttgtgtccttcaccaaaatataatcttcatgaggccaggcaccgggcccggcttcacagtcataccccatccacagctcagcacctgcagcaaagcagacactcaggaaacatttgctcatgtcaatctaaaaagaattaatctaagtagagcgtttacttgggccaagatcgaggactgcaaccccagagcatagaatcaagaagccctgagtatacactcccattagctgcagttacaagtggattcttaaaggaaaagaagaggcagtttctgagttgattaccaataatttacattaaaataacataaactattgactagctgtacattgttctttgtatcacaaattctagggacctgaatataatgggtgaggcagctggttaggaacaaaatgactaaacaattgccctgggcatggagggggctgactgaggtcccatactcttgtctttttagacctgcatacctcacacagctcagacggcagccagctgtttctctttcctcacttaagggaagaatgaccacttgctctcatgtgtccatatatgccctttgggtttaaatagttcctgtgtgatgggaagcaaagcaggttgcattttcacttgaggagttgatgaccagcatccaagtgacatagcacccatctccagaagcttaggtctgatgctgggtgttcggggatcaggggccaggagctgagagtgcagcaggactaggctgtagtcagcccaggtgcagagggcgatgcgacagaatggcagcaaaatcagatgcaccgaggagcgagggagagccagcttgtcacctcgccacacacgggaggtacgtcaaggctgtcattataaactggtatttgagcaggaactctggggctcattcataacactgacatttccaggggtcacacagcaggccccccccttctgctgagaatctttcatttgtacaattatcaaccgcagaactcagacagagcagcctccattattccacctgtccttgagttattattattttattgaagcattttccttccttgggttatatatatgtgtgattttaaaaatataaatgacattatttatagcaaggcgttctctctcctttccactgacgattttccttttcaatcagattctcttcattcttacacatcccatttgagtcactgccacgtgagtaacggggcccgtaaatattcagccacagcctcttgatccctttcttaatcccatttttctcctcacttcaccttcactaggatatttcccgtccttttttcccagtggctttgttaccacaaccatatcttttttgctttgtcttagcgcctattttttaatgtttaaattattcactaatataaccaagtaaatgtcagttaaatatttcagtcatctctctgtgtgtgtctgcttttgtacctagaactctggacaaggcagtaagtaagtctcatgtaaggatcaacagttcaggctccagattcccgatttactaaattctcaaagacaaattacttaaccaaatatggtttcttcaaatccaaaaagagttaaacaatcttacctcataggattgttgtaagaattaaacaagaatatccatgctttggccaggcacagtggctcatgcctggaaccccagcagcttgggaggctgaggcaggaggattgcatgaggccaggagtttgaaaccagtttaggcaacatagcaagatcctgtccctacaaaaagaaaaaaagaaaatctacatgctgtggactacatatttgtgtctcccccaaatttatattgaaaccctaacccaacccccagtgggaaagtcttaggagggggactctgggaggagattaagttttgatgaggtcaagagggagaagcacccatggcaggatttgtgagtcataagaaaagacagaggttagagcaatgtgaggacacaaaggaaagaaaagcctctgcaaaccaggaaatgagtcctcgccagacacagaatccaccggcactgtgacctcaactttccagcatccagaactgtgagaaacaaatttgggaaacaaattttcttcttttaagcccctcagcctttttgctgaaccagacccatttgcccgacacatggcaagccaatccctgagccttcgagatttgcagcagagaaaggctttattcatgagacatccaagcgaggagacaggagagcaagtctcaaatccacctcccgatgggtcatttgtaaggtagttttaggataggaccaatgggatggggagtgggtgatgagaggtcatgtgttgattggctgggatggaggaaattccggtgtccatggatcaggctatttgaggaattccttttttttttaagtttttaatttttttattttttggtccatgattagagtttcagccttctgacatcaaatgttcatccattgaacacttgcaaaaacttattttttttttttttttttgagacggagtcttgctcttgtcgcccaggctggagtgcaatggtgtgatctcgactacaacctccgcctcctgggttcaagcaattctcctgcctcagcctcccaagtagctgggattataggcatgcgccaccatgcccggctaattttgtatttttagtacagacggggtttctccatgttggtcaagctggtctcgaactcccaacctcaggtgatccacctgcctcggcctctcaaagtgctgggattacaggcgtgagccactgtgcttggctgtgaaaatgtaattcaggactagtttgagctgaattcggagctgagtcttgagttacggaaaaacagcttagccagcgtcctgtgatccatacatcagggtgaaatgctatctataggatcattgcggaaactgaggtgaggcagtgcagctgagtaagcaggacagctaacaatgggtaaacaaacagctaaagtcaataactgcctagagaaacttcagctactggctacctcatcattaatggctatctggccactggttttaagcccatggtatcttgttatagcaacatgaactaggtgtcacgtaaaatgcttcgcaatgtcttgatacatgggaactctattgttattattattcgttgctatagcaaaagtggaagcatttatgccaccaatagcaccagtagagagtaagccatgacttctaatccgtgggtccagagtccaggccagtgtagactggacaaataatatgccctagacatttttgtattacttttgaaaatgtgcagttgccattatgtttaatagtataaaatgatttaagtgctattgatattatcagataatagtaaaccttaataggggaggtatagggtcttcatgtctgtaaaagcaggtaaacattgacctgaattaccatcaagtatgaagaccaggcatagagcatgtgctgcaggcagttccctcccagggcaacaggctattaagcatccattggcttcttttctgatgcccctgcacttacctcacagagattatctcctaaggttttcctaggtttaacattttattcccacctcaaaatccattactttgttttcctccattctttcagttcttattttattctctaatgatttggttttctcatttttttttgaggctaaaatatctcctactgaagctactctttcaattagggagaaaagcactcaaagcctcttcaagcttctgcctctgaaactgctagcagggaaactccagtgcaaaaagatgagagtggatgcaaacagggaggaaagaaaaagaaactaaagaacaaagaaggaaaataagtgttcatgaggaactaattattctggtatttataaagaagttattgtttcgtttccttttttttctggaagatcaaaatatgtgtatctcattaatcacagacatttggataatgctgtcctgcatgagctccacacaatcctgcctgtggagcagatagcatgagctcgcttttacagacgaggcaaccgggagattcagagcattggtgagaagcacacaaggcggcacagccagtgacttggatcaaggcctttggtgtcaaatgctgtgctttttccacctctccttgagggaaggcttgaggagaaagaagcacttagcacacatctctgcctgcatattccaaaccaatggagaaacacaccaggaagccacatgaaggatgacaacatcagctttgccgctggtaatgaatagtatctattccaggcccttctttcattggcaggctgctcgccaccttttgcctgagccctggacctcacatgctcaggaagtcccccaggctgaccagtcaggcagatctctccttccctctgaagaagagccagtgagagggagaagagggccagtgtatgtttccaactcacattctttcactgacataggagggctgatcaacaggttcctcccaaaccatccatgttactgttttgtgtgctcatttgttttattaaatcctttatccagctaaccaggtagcaggattctagtcactcgatttgcctgtcccctgacagaggagaccagaagtccccgctgagcagcccagacctttgctttcttctccttttacaaaaaaggtggaaaactcagggtgttaatgtcaaagggaagacgaggagctgtagctctagacctagtgtaggcttagagagctggagtcatcagcacagttgactttgtctcttccttctatcagccacaaaagtactcacatttcaaatgacaaaacacaagtctcaggcttccaagagcagtcacttcagctatcctgcctgagttcttaggcaagtctgagaggaattaggtgtttcctttccaggcaccagggttatgaccacttcagagccttgccttcactgagttataaaatttttttaataagaaatgtctggtaaattaaatcaacagtctgttgatgaagatgatagctcccacgtgcagaaatccctaaattctgagcttcacgaaactgagctagatctgtttgaagtcttccattgtttttttctctctcccagttgggaacactggcacttcccgaatttgctttacagtttcaacgtcagcctcgttagcatcaccaccagcttcctcactctcatttgccactgtttcttgagtcaactggatcagaaacatcaatcattgaacagacaccctatgcgtctgtccctgttttcaaagtctgcagcttttggtgtggtgctgttgctctttctgctgctcttctgtgacccaaacagtggttttttgcagatcttcagattcaggatgatgtcgcctttcacatttaccgtagcactggtgactcacaagaaaagtcctctaagcatatgcctagaaaaacttgagatccacctctcagaatgagctgtaaaatgcaaacaccacaaccgtaaaacttataaaaaaaaagttcggccataaaaaaaatatagtctcctgatccatggcatcttggaaattctcaaactcctgcctccatctcaccataaagcttttatcaattatgttattcttgttcatgactgcagtaaaatgcagtttggtttttatgcaattctgtaagtgtactgctggatgggaaggtctcaggctttgtgctttgttctgtgtccattacacagatgataggtttggaaatgaagatgccagggttttagtcataattgtcacagaatatgtgacagaatattgtggctaataccacaatctattcaggtacaccattcaggatttaagggagcatgttctgggccttaatcatcttcatcatctgattaaacccagtagcagcttaaggttaccaggcctcctttgggcccaaatctgtattttagagtcagaaattttcagtattttcaagaacggtgaagctgtgattgaatcactaaaagtgattgtctcagatccagccatgccaagcaccagctgtgtacacactggatctcagtgttctcctcctcagaggtcttccttagctcctcctctctcctgtggaacacacttggagctctgtgaccaggagggagtacagtatagagcctgatccctgcatttctgagacagtcaggttgtttctctttgatttaaaatgatatcagaagaaatttaacagtctattggtagtagtgtgaaatagtacatgctttatgaagaagtctggatgaaacatgacaagctgaattggccccatcgtgagaagacgtcatccataattcccaggattttttccccttcctttttctatcttctgatgccattttcaaatctatttttcattattcctcccaacctaatcccaagtttcactgttgtttgtttatgttgcttttctactgccatttaacttaaaagttattgaatttctactatattttgagctcatgctagttgctgattatcaagctcctgatttgagtagacacagtctctgccctcagggagcttgtgatctgaagagactgtgtatgcatgcatattttctagccacaatagacatggggatataacacacgttcattgttatagagtataggaggccgaattctaagataaccctctagtccatccgcctacccctgtatacaccctgtataatctccccaacttgaatgtgggaggcaccaacaagcgtcatgagatatcacccctgtgactagattcctaatcaattgcctttaatcaaaaaggagattatcctgggtgggcctgacctaatcaggtcaaccctgttaaaggggaggtatcagagagaccttcttctgctggcctggaagcagcctatgggaaaggaccacatgtctagaactgaaggacaaccagcaagaaaacaggacttcagccttgcaggtgcaaggaaatagttctgccagcagccagagggagcttgaaagcagatacttccttacttccaagtctctagatgaagatgtggccagctcacaccttgactttagccttgtgagattctgaggagaccccccagcctgaacataaggactcctaatccatggaaactgcgagataacaaatttgtgttgctttaagatgttaaattggtgataatttgttttgcaacagtataaagttcacacatggaatttaaaccaaatgcaagaggatgagaaaggaggaaacaggtcattctatctgagaagtggtggaaatatgatagagaggaaggcattatctgaggtgagacttaactgatgagtagacattttttagacagacaaagagaagagacatttatggctgcgacatcatccacaatatgtttgtagaactgatgtactgacataaataaaggataggcattttaatctgtccctgatgttagaacaaaatatcatagactgagtatcttataaataaaagaaattcatttctcatagttctggaagctgggaagtccaaggtcaaggtgccagcaggtcagtgtctggtgaggacctggtctctgcttccaaggtggtgccttgttgctgtgtcctccggaggggccaaggctgtgtcctcacatggtgtaagggatggtggggcaaaaaagggccaagcacctttctgaaggctcttttggagccctcgtgaactaatcacatccccaaagccccactgcttaataccattattttggtgattatgtttcaatacatacagttgagagtgacacatatgttcaaaccatagcactagggtgcctatacttacatttctttttccttaagacaacagttttaaaattttatttatgaactttccgtgggtaaagaagtgaagtgagcctttcttagtttcccatatcattaatggcccccatatatgttgttgtccagcattttctgtagctccttttcagcattagtctcatattgatgcatttttaaatcagaaataaattatgaatgcacacagcaaaaagttgaatggatttctttgccatatcttttaacattttcttttcttcctgactgcttacattctggtatggctaatacgttgcttcaaactcataacctagccatctaaagtcacatactgtcttgtgaaatacaatgtctttatccaggagtggttagtaacctgactgtgttccaacttcattttgccctgcactttcacttagggtgactaagcagcgcatgatcttccatcgttttattgcatggtctgggtccttgtgcatcattctgtcagctacgactgctggactcactgtacaattcccacaagtgtgttaaagcccaaatccaatagtgttaaggacctccaattcctgacatcttccgtcgtctcatttttaaacaaaatagtcaatagccttggtgtcattgactttgccttcctctgttgttccaatgttgttccaaaattgctctgaaaccttccaccaagcttacagtacttaatcatcagcgaattcttcataaatgtcagtgggaaacccatcagctctaagagattttctttatctccatagcctttatgaggcttcttacccctcaggcactgatttttgccccttacaacctcaatttcttcttcttagtagcatctcaggcagaacagggatgggcttctccatttcttctttgctcctcatgtctgtcttccccttggggaagcccattcttatcattcacagtaatccttgacttttcacacaattaacatactttcttagggagctggaaaaatcactgtcaaaagtccctttgccataattctttttggtaaaatagtacacatttttgtattgttttctttctgaaatagtcttctccactgtgtatcattccacctaggtcaattgagcatctatttgtcagagatttattgatggcatgcggaatacatgaggagtgtaagattttttggctccaaatataatttttctccttgttttaggcaattgtgaggtcacaaaaaattgtagaaagagtttattctacaacttgccattaagggatgccctcagagcagttctctttgtggtttccaggaatgcattaagcttaaggtgaagataatctgcctcagcattcaatataagagtatcattaacactctgagtgctgctgtgggctcttcctagatgcatgtgcctttcagaacagactgggatttcagaactgctgagagaacctcaggctgctggagaaattctgtaatgtctcatgagaaacagagtgcacaagctcctttcccctttctcttcctctccgttccctgcagtggtttccctaggttcagcaaatgcacatctctctgggagttttgtttccatgggagttgaaaataagcactccaaaggtgaatgctcgcccagtttacagtcagtatgaccattgcttctattcaaatatccctagataataataattcagcacagggctcctccaggggaatgctgtgcttccagcaaatctgtaatttacaaaacagtcacctgagttttaaaaagataatttgaaaatattcagaaaaacgatgcctgtctcccacaaatgttagatttggagcattacaactcatctgtgcttggtgcctttatttagtttacttggtttagtttacttattagttcatttgttttagtttaataactaataataactacttattcacttggttttcgtttttgctgtgcatatcacttgcttaacaaggaaaaagattatgtgtctccttcctggaagtggacttctctgccaggcaaagatgagatgacattttgggtgatttttagacagcagaaatcaacatgactaaaaatttggtcattttagttgctcttatttaataaatccccaaagagaaaacattagttcctgcatgtccctcttccctctgttgacaccatttataggtagtcatttagggaacatctcttctggatactagttttgataatttcttccatccaaaaagagtagtccttaagcaattcttggtatatggtatatcctgtagctctgtctgacttaggaacagcatgaaaaaaattgtatatacttggtatatttattctaggagcttttaattcaagatgtacagtaatgtaagaaactcagtcaacatgatatctatggctaaatgaaggcttctctgccaaaacacaatggtaatgtgagattaatgtggagccggtgcaagttgggagagtagctatgcataataagtgactatttgggatagtgcatttattagggcagactaagtgctttgacaaagataacccacactgctcattgtgtttccagcatccacgggccaggaaactcaacagaagttctttcctggaacaactgtggggcctgctttatttctctgcatatatctctggcccctgtgtctctctctgtcaaggtgatgctgagaaccttgaggctatctggaataataatcctgtgtggaagctccactcttaattaggttcaaactacaaagctctgccactttgcttaactgagaaattttagtagacatttgtggctcaaaggcttttaaagtcttatttcacattgtcctccagaatctgtttccaacctgtgcgactccaaatttctgatactttaattctgtttctttttgtgtgcaaaccagctaattttatcttgaactcatctttcttgcaataccttgccaaacacagtgagggaagagcaacatatgctagcattctggctctttcctgctacttccctgagaagcacgggctcagtaggcacttggtctgccttccacgttaacaagggtgacagttttaccaaatgtttcactacagcagagcagcaatttccagcttgctaggcctgtttcctcagtgtctaccacaaaactgctaagctggtgtcagatattttagacatttttttttttttgtcagcatctacttcaaggctttgacttctgtattggttagggtaacgttagctgctgcaacaaacaaattccaacattgaatggcacaacaaaacaaatgtttatttttccctatacataaattccagtgcaagagttcctggagcaagaaaagatagatttccgccacatggtgtcacagggatccaggttccttctgtcctgtgactccactatgcactagagcctttgaatcctcagcatccagccagccaaagaaggaagagtaggaggcttttgtgtaccagccttgaaggtggtacatattacttctgctcgatcccattttgctagaacttagtaaaggctataccaatgtataagagacaggtgaagttgtctctgggcagctgcttctcatcaacaacagtgcatatactacaaaaggttgaatcatgaattttgggtggcagaaagttgcttctgccatacatagaaaaggtgttggaagaaattattgatttctattattgaaggaagtactcagtgtatttatatatattgcatataacatctccaccaatgcccactactgccttggtagagtgccctctctttgcaagcctgagctagacaccttggtttgggaagggttaatgttaaggagaaatactaggctcaataaagaaagcacatacattcacacgcatgcagatacccatacacatacatcttaaatgaagatctttattgtggacaatatgattccaattatattcatttttattatataagggatatttttaaagttgtgagatacataaaccacgtgtttctctcccaatttttatgagtacatcccccccaccccccaccccatgcaatcctagtgtgagtctacctggaagcatgcagtgccaggctcttctctaatgctaccattcttagcatgagtttgataactgctctccatggcatgctttctaattctgcgttcttgtttcagaaaaatggcataacaaagccccaaaccccaaaattttaccctcattttttcaaaaatgacttccaaaagtattgttagtaatacagcaagttccctctagtttccttgcaaattgacatactgagatattacagttgctatgaagtttctggtgactttaaaaacttttacattacattagtgtaatgacagggtttatctacagcttatgactgtgaatgcttcagcatacatttccataaatagaaacactgtagattttacattaatcataaagggaattgataattgcctatgggagtttttagctatgagcaaaaatgtttgacccaattatgcttgcatggtgagggacaaatatattgaattatgatgcatagatcattggtggatttcagggaaggaaagtaactatcccaagggaataatccagaagtgagcaagtgtttacaactcaaaaactgataagactgtcattacatcaactgtcacagctcagaagtttaaccccactcaatacataggatgaaaaggtaaacctgggctgttcaataatgttaagcacctgtcattcaaatcccaatatccagatgggtgtgttgagaagaaacatgcaacctctacatgtagctgaaacccgtggtgatagttggtgactggttttccaaaaggttaaactgaagctagtgccacaggcttccacatttgaatgatttgccaaaagataagcttccagtcttaattcaaaagccatcaactacattctttgaatgttgcttaagattctatttggtgttgataaagttgaatgagaaacttaaaagtgatttatcagatttaatttcaaagtaaagtcccttttcacatacttaaccattcaaagcctgaggattttttgcttgctattatgaattgaatggaagtcaactacaagagagaagaaagatcaatcactttagtagtcatcaggaattctgcttctaccacaaattacaagttcctcagattctattttcatttataaaatgaagaatttaaacataaaaactagctctagcatatagtgatggtaaaagtcatatgcagtacaggaactttagtctcattctatcttcctcttcaatattgactctctttcccattttctcaaaacttctgatgactagctcaattttccggttaactattgtagtagggagaactctaagatggcatccaagatcttcaccctcaaatgtacacaccagtgtactacttgatctttgagtgaaggccgaaactgtgaataggatgggatagtctatcatagctccctgggctaggttatgccacatggcaaatgccggtgggatagtcacccctgtgattacatcacattatataagttttcatcatagtaaactggggagcaataggaagtcagtgaggcaaaatccttctgtcctggaaggaagcaaacggcaccattgtggactgccgatgggggctacgtggccaacaaccacatcacagtaagcatctaggaactgggagtggccccagctgacagctcataagatcacaaggacctcagttccaacgccacagaaaatgaattctgcccacacaaatgagcctggaagaggattcgaaacctcaggtgagaatctcagccctggctgacaccttgatttcagcttgggcagatttagagcagagaactcaggaaattatgacccataacaactatgagataataaatgtgtgctgttttaaactgcctagtcggtgataattcattatgcagctgtagaaaactaatataactatatacaacatttccaatcaatattcaactcattcttgtatttcattgtatctttattccttcttgcaaaaaatattttttaagcaccagcaatatgatagatggtgtccttgccaccaatgatataacatagtctgtgccgtttatttttcgtagactagtagggaaaataattatataaacaaaatagattaagaaagtatcacatgtgctctaagagtagcttctacctgagatagccagggcacaaggaggaagtcagtcagtctaccagtggagcaggggagacacaagaaaagattctactataagctgcaactcagggcaagtgttgaaagacaagcagatgttctttaggtggagagggaatagaagagcaatctgaaaagaaaagctataggagtaatcacacagagatgtttttctaggaactgtaagtgggtaagaatggtgaaaaggatgggagtgcaggctagaggtgattgggattaggaagacataccttagagaagcactactccaagtgtcatccaagggggaacagcacgggtgtcaccagggaaagtgttggatgtacagaatctcagtcccacccactcccctatatcagaatctctgccttcaccacatccctggggcgttcacaggaactttcataggtttcagtgtcttgaggctagtgaatctggatgctgtctttcagagaaagggaagataatgaaatggtttaagttggataacaacatagccaaatccatcttttagaaatagcaggaataaggaggggaggtgaatttgtgaggcacgaaataggaagcagagaaaccagttagatcctgattctaatgtccagacaagagagccacgcagggacagcaggtgcagagaggagtgcataaggaagtcagatcttcatgaggcagatcatccagggtgtgaacgatagacgagacgacctcactgagggacaatggcttatttaagaagcatcttagctgtctgcttgagactatgggtcattctcaaatgtaggagttttattttggacatgtggagtttgagatgcctgtaggactgaggtaagatatttaggaagaagtgggtgtatgggtctgagatcactaggagaatctggttcattaattcaaataccaaggacttgcagggtttatcagaagacatgagagcgaatgagtgcttccaagctattaatttctattcaatgttgttttctaatatgcttgacacttctatactcaagatttccatggcacttgattttccctcttccaccttattaaaagaatatttatgaaaacacaaaaatatgtccaatgttaaaaagtttgaagtggactaagtacacgaagcagcctttagaatctaatgtgagagggtccttatggttcccaggtggaaggtgaggctgtgatggaggaaaatccacccacccattaaatttcatataccttctccttgatggttaaatacaaagaaagaactaataaccataaggaacttgtgaaaagatttgctggaatctgtgtcgtacttacaagatgaataccattacacctaaaatgtaacggaggaaacacaatttttaaaaaattatactacagaaaccagaagacaactttagaaagtatcttgtacataattttcataaaggcaaaaaaatcactaactatgaaaaagagataaaatagaaaatgatgtaactgcagactgattttaaaagagagctctattatatcaagaaatatttcaggaaaccataaatgcaagaaaggagtataagacagaaatagcactctaaaatttaatcagcaatgcagagaacacatttgagaatttttttcaaaattaaaagataaagaacaaagaagtaaaaaaaaattaatgtagaaagcataaaagttttgaactcaggagaatttaagttcataaaaacaaatcatactgaataggagtaatattcaaataataaataattgtttcctcagttgaataaacattttaatttacagatagaaaacattcaggaaacaccaggtgaaataaatgaaaaaaaaagaacatgataatatatgaactcaacttaaatatgctatatactaatttattattgttaaatgtgtgccaccatagcaaatactaagtaatatactgttgaattaattaatggaatatagcataaaataaacatcaaaaggccaatagtgaggtttccagaattttgcttctggcaatgagagattagtaccaaattcccttcagctgtaagcaactagaaactggcacaaaatatatgaatcattgcttttcagatattggatgacagtcaatgaagacagtgatccttgaggaaataaaacagatgaagtgaagcccatggaccactctgcactctgcctagatgcactctctggaagctcattatcttgctgagttaaatagaaatcagccttcagtgaggctgaggagactgcagaaggaggtataaaggactacaaaaattgacacagaggtcttctagactttattggtgaacacaaagaggcattagcacagggtgaacctgcacacagcatggtggaggactcctggaattcattaatggtttatttgagttctgaccagctagagtggagagattttattgagcaagtgggacattcagtgaagacaaaagaagggttataatacaggaaaacgtttattatttgaaaagatcaggaagattaataaatcccaaaagactgcttaataaaatacagaagaggtgacaattagtgaaacagagatgaaagaaaagctatcactatcacttctacagacattaaaaggataataaggttgtataataaaaactgtaggtcaacaaatgtcaaattagatgtaatgaaaaaattccccacaaaccaaaaattaccaaaatagtcacaagaataaatagaatacatatataatgtttccacaaaaaaaaacaactctaggtctgcatggcttcactggttaattatataaaatatttaaggaggaaataataacaaatctatagaaataatttcagaaaatagagaaaaaagaaacacttcttagtttattttatgaggccattattacacttatatcaaaatcaaagaaattacaaggaaaaaagctctattaatcaaaattatgcataaacatggacacaacagtccttgacaatgtattacacaattaaatccagaaatatataaataggatagtttatgacaagtatattttatcctaggaattcaaggttggtttaacatttaaaaagcaattgatataactgtatattaataaaatgaaggggacaaaaattaatagaagtggtaaagcatttgataaattcaacattcctttgtgatacaaactctcagcaaactaagtaaagaaagtaactttctcaacctgataattgtaatctacagaaaacctatagctattatcatacttcgtagaggacggaatgaatactttccctctaagaataagaacgagaaaagaatatctgctctcaccactgctatctgttattaagctggaggtcctagctattgcaataatgtaagaaaatgaataatatgtatacagattggaaagaaaagtgttaaattctctgaatttatgagtggcatgattgtgtacatagaaaattcaaagcaatctacagaaacacaaatattaataggtgaatttaacaagggtttatgattacaataccaatatatagaaatcaagtttatttctgtatattggcaaccaattggaaaatttaattaaaaatcctatttacagggtcatccaaaagcataaaatatttagaaatgaatttttaaagatatgtataagactgttcacttgaaactacaaaacattgctgaggaaatataaaggaaatctcaataaaaaagaagagacagtgcgccatatccatgggttggaagatgatagttttaaggtgtcagtgcttcccaaactatacatatgctcaacaaaattctaatcaaaatctcagcatatttttggggaggaattgacagtctgactcaaaatagccatacacatatgttccactgattttcagcaaagaggccatgatgattaagtggggaaaaagattctcttttcaatgtatggtgctcaaaaaactgaatatttatatggaagagaataaacatccattcttacctcatgtcatacacaaaaactcaactcaaaatgaaccacagttcatataagagcaataattatacaacttctagaaaaaaaatacgagaaaatatgtgttggccttgagtaggtaaatatttcttagaccgaaggcaaaaaggacaaactgaagaagaaaacttaagcagttaaacctcatccaaactgaaatcttttactctgtggatgtgtaaagaaaatgacaagataagacacaaaatggaagacaatattatcaatgcatttatttggcaaatgacttgtaaccataatctataaaacagtcataacaactcaatcctgagaagacaaattatccgttttttaaaataagtaaaatgtttaaacaaatacttcaccaaaggccaatgagaaagatcaataatcacatgaaaagaggctcaacatcaagcaagtcaaaaagaaaatgcaaactgaaaccacaatgaacgcctcttcccacattctaggataaataaaaacttaaaagactgaaaaagaaagtgttaaggaggatgtgggaacaagtcaaattctcatatattgctggtaggaatgtcaaaattgtacaaccattttggaaaataatttggtggtttcttctaaaaattaaccatacaataacatatgacctagtaatctctatgtatttatataagaaaacgttcatagcagtttcatttatgatagccaaaactaatactaattcaaatgctcatcagaaagtgaatagattaaaatttatattagattcatacagtgaaattctattgagtaatgagtaatgaaaagaaactttgatacacaaagcagaaggaataaattcaaaaaacattatgctgagccaaaaaaactagatctgaaaaagaacacatatgattgcaatcatgtaaagctctagaataggtgaaaccaaactgtagcaagagaaagcaaagccacatttcctggggtccgggcttgggggttaggggttgctgaaatacactggagagggacatgtgttgagaatgttcaacagtggtgattacagtggtggtgacacacacagacacatatacacacatatgtgtaattgtacactttcaaactgcacactttaagtggtcgcattttatcacgtgcaaaatacaccttaataaagttggttagagagttcacaatcgttctaaatctatctttttagctttttccatattttataaattctttctccaaatacctgtattaatattttcatcagtgataacctaataaaaatatttttatatatttttattgctcatgtcaaagaccccacgtaagcactctttgcaagcaacttaatcaactctacctgatataatagtaatgtataaaaactacagtctttaaaatcttccttactgtgtgtgtgcgtgtgtgtgtctgtgtgggtacacatattggtaggttttcttttactgatgacatactggactcatcattttaaaaagaaaagaaaacctgcaagacacaactagcctttgcatgtataattttccccatcagtcttgctgaagctgacccgtacagcttctggccttgtaacatatctgggtgtgggcagtggcaggtgggagcctggcaagccaaccacaggcagagtgaaaacacctgaaagcacctgagccatggtgaggccagcgtcggatcagaagcagaaatgaagacgatatgaattttaacgagttaaacatagtgcaaaatgagacagagataaaaatagatcagatagagtctcaaaagtgagattcaattcttctaaatgtccgagaaagctaattctacaattggacccttggcagctaaggctaacaaagaaattatgtagtattacttaattatccttttccactgaaagaaagagcatgctggttttctgaaagaaaatatgttcctggagaagaactcaagacagaatttactatgaggataatgaatctttggtaacgaggtaaatggtctcttcaagagaattttgaacaaggcagaaatcttgctcaaagacactgttcttgtacccaagactgcagaggtgagactaagatagagacctgatgaagatggctaatttgggacacaaggttacggtaattttttaatctgataacctaacaatacaatgcaagtaggactaggaggggacagaatgtgctttataaagactgatatgcctattaaacagtctgtcaaatatcagaaatattaggatagcctttggcgagtgccggggctcagacggtttacgattgaattttctaacaggtacctgtagtgcaggcgttctatgttgctgtgatggccatatgctttagataccagatggaaaggaaggtgtcattctgctggaaagttgaggagacagacagaaggctatctcacttcagagcaggtggagacagcagggtttctttcagggagagccagcattttcttcggggaagagatttctatcttctaaagtacttaagcatgtgtttgcttaagacctcaaagttctaaacaacctcggaaaaaaatggcattagcttgaaaatttttaagacaggtcttggagctgaccaccttatccatcaaaggaacttcagcattcattctgtggaatatctatctttagacagactacactttgatgtgttttgccaagatgactaagttacaagaggagctaaaaacgtcacctgtgcattggggttatatctgttttaccatgtttacgctcatgaatgccttacaaattctgtgtttgcagtttgggtaagagtaatgcagagatgctcaagttcacattcttcttgagaacaattactaaagtcaacagaggttggaggaaagcaattgcttaattcagctttatttaatgacccagatgattactgagcaccctccaagataaagaaagagtaaaatacagaagctgtagggaattttttttaaaatagtaaaacccagtgccagagagcttgacatatacagccatgattgtgtgattgatcttttagatttatcgtgctatttaaatatgaaaatagaactagaaaacatgttaaagtcaagctccaattgatagcatttaaattagaggttgtacctgcaggaggctattcccatcatcaacactggttagcagaagggtttagaagcacgtctgaagaggcattcttagactaggctctgttggctacaggctattcctgtccattgagctaaacactagtttaatgagcactgaaaataggcttaactttaattatcatgtgttttctttcatgtgaggaaattttataagtggaattatataaactctggcttcctataaacatccatgcatatgctattttgtgagcattagtattactaaatcttcacttgctattgtgtttgataactaagaccaaatgtttgaaaattaactacaaaaactaaactcattaaggtaaacagattactctttaaagttcccaagttaaaatagttctcaacccattctaactttcagtaaccttttgattctgttacagttttacttagagtccctctacccttgggataaaacaacagtttattatgatataatattttatagttaattgttcaattctattactaatatttaaatgatatatttgtgcctatacacaaaaatgaaaatacttcacagtatttttattagattttaatattaacataatacaagattattattattattattattattattttatttttattttttttgagacagagtctctctctggcgccaggctggagtgcagtggcatgagctcggctctctgcagcctcctcctcctcctcctgggttcaagcgattctcctgcctcagcctttggagtagctggggctacaggcacgcagcaccatgcccagctaatttttgtatttttagtacagacggggtttcaccatgttggccaggatggtctggatctcttgacctcgtgatccacccaccttggcctcccaaagtgctgggattgggtgtgagccacggcgctcggccaatactggatttttaaaccaaatttggaagttttattgttttctatgccatgggatagtttaaatattataggaatttaaaggttagttgaacctcagctgtgaacccttctggtcctcgtgcctactaaaaatgacaggtgcttaagttgatctgttcagcgtttctactttctagatgaattttggtagttagcattttgctaggatagcatccatttttttctatgttgttattgagtttcacatagtattcctataaaacacttcaatctgtctggactcagtgttttgttgtgattgtttcttttctcttttcttagtcctaattgtgtctataattgttttctctgttttcttcttcatcagactcacaaaggacttttcaatgaattggcatttgaatttcctcccctgctctttttaatttgttcctttgtttgtttttaattcttgatcatatccatgttaagtccgtcattttaggtctgtttaattattttgttgttctttctgtaatttcttaagatgagttactatattcttcaatttatctatcttcttactgttagttttttatgaactatgccaacttaaaaaaatttattactctttcccattataattatttttgtcagatccttcctgccttatggatcatttcattttatataattgcctatatattatatagtatatggagatttatacctaatacatcttaatctttatccatttggtggctctcttttgtatttttatttgtaattttaaaaatttattttaattttttgactgagtcattggtagatattcttttgtatttttagaccttccattctacgttattaacagttatagtcttccgtgctgacacaatcagacgtgttttctctctattgtttgaaaacaatataaaatataacttcctcaccaagactgactttcacccatcaaaatgcccgatttcctttcctatcctccctcattagatgtaatatttgggaaatgtttcttcctcctccccacttacctcacagcaaatctttggtattttttagggtgcttctcccactttcttttcttccaacttaaagttctagttataatgtagtgttctaggcagcatttagacttttttggggtccatgctctccttttcaagggtgggtttgaacacattctcgggcaatctctccgtggccacctgggaaggaagataggcgcttacttctcaccctcgtttcttcttcctcacccctccctccctgcggtctctgttctggctcattacccgtttgctgagctgttcttgagtgtttccttccagggggccggggtctctgcgtggagcactctctgaatgagtgtcgactctcgaaatctttcttctgctctgacaagtgaatgacatcttgaccgaatacaggagtctagtattgcagtccttttctctcagtcatcgctggatgttatgtttcttctagcttcctgtgttgccgatgattctatttctttttcctttgtaagtgactggttccctctacacaagagttcctaaagttatatagttatatagaaatcggaaatttcattgcagttaagagtattttaaaaagacacatgcccagtgaaatagagatgctgaagatgacaaagtgaatttaaaaataataataataataataaagaagaagatttaaggggagctcagaagtattgctgcagttaaaagaaaaaaagaagaaggaagaagaagaagaagaagaagaagaagaagaagaagaagaagaagaagaagaagaagaagaggaaagaagaagaagaagaagaagaagaagaagaagaagaagaagaagaagaagaaaagaagaagaagaagaagaagaagaagaagaagaagaagaagaagaagaagaagaagaagaagaagaagaagaagaagaagaagaagaaaagaagaagaagaagaagaagaagaagaagaaagcatgggccgggggcggtggctctcgcctgtaatcccagcactttgggaggtggaggcaggcggatcacgaggtcaggagatcaagaccatcctggctaacacggtgaaaccccgtctctactaaaaatacaaaaaattagccgggtgtggtggcgggagcctgtagtcccagctacacgggaggctgaggcaggagaatggcgtgaacccgggaggcggagcttgcagtgagccgagatcgcgccactgcactccagcctgggcgacagagcgagactccgtctcaaaaaaaaaaaaaaaaaaaaaaaaaagcatgcttctcaatgaagaaaacaacacattttgtagttaaatgaaaacagaaagtgtcactgttgagactcaaattagtggcctacaataaaaagtgtaaattatatttcaaagtacagattaaaaggataagaagatggcaattatgaatatggacatagaagtttaatatgcaaataaaaattatttcatatggagaaaaagattgataagatcaaggtaaaatccgagcaaatcatagaaaattatttgggcaagctgaagagagacctgagcctcagtgggtttgctctattccaggatagactgatgagaaaaacacatgccattttgcacgtgttttattgcaccatcatattgcaatgacatttctgaatcttgataatctattatttttcttcaatacattgggattcaggtaatgttgtgaaattactacataggtgaggggagataaagtggtctcttactctgggtggtataaaaatagtaaagtctcccctactgacacacatttccttttaccctcatggcctcagaggcaagaaggatgcatcccatgtattcagccccttctaggcttcctggtcatttgagagagtcaggccattcaaagtaggcaaatgttgcaatgtcaaccttcacctggggtcctcacagactgttgtggtataggcttgccttaagattccccactttctggtcctggacaaaaataccctgtggctaatatctagtcctcttacagctcacaagacagtaagtcctgtgggaattctctccatagcaatttcagcagttactagcatcagaattgccctttggtcccagatgtgtgagtcaagaggcacagattaaagttgcaagtaaggagaaaagagaaacattcagatctgcactgcaaagtttgttttaatcattcggaaatatctttggagcaatctctatcacactcagaatacaaatagcagcaataactactactaattaatattgatgctttaaggtttacaaaacacatttgatctttgaagtcaccctgtgttatgggtgttattgtgagaaaataagttcaaagtggtttagtgcggtgcctatgtgtacaagttggcaaaaaacaacaacaaaactaaggctttgtctctccaagtccaatgatttttgcataatcattttaacaagcaagaggaggtcaaagctagtttcagcctactgactttaatctaagtgtataataaagtagtaaggtgtatgataaagcaaacaactcccaacatcaagatgaataaggtacttgcagatattctggcaaaggaggagttattttctttaatccaatgcagtgttatctttctaaagccaaggacagtatcatttttgcttgcttgtttttgtctgtgtttatccttttattaaatgtaatgagtgagtgtaagtaatacatacatcaatatatgcatacagagaaatccacatatcacggatgtacaacttataaattttcctaactgaatacaactatgtaactaccacccaggtcaagcaacataacatcactcacatctgagaaggcccctcaggctccttcacaatctttgcctcccctgacaaagacagctatgaccctgacttccaacagtttagaagacttttgcaaggacagtcttacttgccattctacacacatcatgtaacacagaatatctgctgtgtttgataagtatctgtcggatgtgtgaatgaatgaatgcatcagtgaataactgagtgagtcagtgattaaatgaagagacccttagaagacgaagtgttaccaaatatggctttggagggagagtttgaagtgaggttctgagcttagctggttgtttaatttgaggcaagttgtttaacctcattgagactcaggttacttatctataaatagaaacagcagtgtctatcccataggactgtttgtcataagcctaaggttaatgtatatagaaccagtgcctggcacctgtaggctataactgatacgtaataattgttattacaagagagggatccagctatctgcatttggggcatgaataacctccttaccctgatcttttctgttttaaataactttcaaatcctttcagaaatgatacaattttaatacagtggaaaatgtgtaaccatacccagcatatcctagcaaaaataaaaacagtcatgtacctcataaatatatacctactatctacccataaaaaataaaaattaaaaaaacacacaaaaataaacaacaaatgcaaaagaaacaaacagaaaatatttggtgggtaatgcaactggttcgtgtcctggagtaagtttgggtggagatctggttttctgttcctttgcctgcagtgcctgctggtgatagtatgttctcagatttctgacactccaggtttgaattattcctggtggtggtgactcaccagccaagccgggttggatttaagctgggatagatcaatcaaattcccactctacaccttgggtgttcgagtcccacaataatcaaacctcatgtgatctctaccactacagcccatattcttcatctctatttaatgccatcaccacctcttcataaaactccacctttctggccaccacccccaacctcattgcttcctccctctgtggcttagacggtgatgctgagatgtccataacaaatgggcacggtgccttcacactgctctttctgaaacgccacgtgcagccccttgatctttgaattggtattgctttcatctggctttccagttaagaagagtggcaattcgtttcatatgtaagaagaaagactgggctttaaaaaggtttgttttctgtagatctagtcaaatatttctttagaatataaatacttatggaagaagtcatattcacattagttaagttgcttaatttctcttactaaccggttatctctactgtaaaatggagacagtctggattggattctccagagagcagttagggaaatgcacatatggaaggtgagtggacagagtcccattaaagtgaaggccctggaaccgctccttagcgagaatcgccaacgtacttagaagggctttttagtatttccatgatcgatctacataaaaaataaaactgcaacacacgaaggactacccatgaatgtggaccaagaggtttgtagggagtctgctatgttggaagagtaattttcctattagtaataatggtaatgctactattatttggttgctatcgtttttttcattgttactattaatgataataaggacattaatttgttcagtgtctgttgaactttgtgaggtgaaagaccatctctgtctttttgtaccctatcctcagcacttaatatttagcaccagctaggttctcaggtgactcaatgactgaataaatgagagacagatacactgtgcccaatactttactgtgttatgttctttaacttgaagcaactctagcaaatagcaagcattatctccatcttacagatttttaaaactgagtagcagagatgttaaacaatttctcaaagccatagcacctatgtgtttccatcccggtcagtctgattccaagaaagtctaaacagcacttaccactgctctgtaatagttcaggtttacaaggtggaagcctcctttagaccactggaaacccctatattatcctgtcacgcttcccacctcccaccctattattttcaaaaatggggatcggcatgctagttagaggtcctggcagaagtttctggaaggcgaggttgaaaatgttgaggcctgtgcatggatctgagcatcagcatacgggctgagggccagctctaccttccagctgctgtgctgggctctgcttcaggtcatttctataccaaagaaaggtagattggaaggttctgaccatggaaccacaagaacgactagagtgctggagggattgactggtgagataagattaaaagacctcaatatttatcatttttctaagccgagactgtgggacagatgggataaccatcgacaaatatttgctaggtgtaatcacttcagactactgaactcatggacggttctccaggcagggacatgctgcttgtcagaagggaatgaagggggcttggagggtgtggagtgccacggtgcgtgctgatcctccttgacaccacctctgtgtgcagggcctgtctcgcacctctggcttgggagggtagatcatctctgcacctcccctgtgagcagtcacactgctgttttgagtacaagccaatcaccaggataaacgttttgtaatggcccaacttaaggcaatggaagaaagggacaaatccttcaacgcagtgatcctcatgtaattgatctgcaatagccattagcctaaaactcaccttccatctacatgctccgtagtttctgtgtaagcgaatgctgtcacatgaggcgtttgcctttcctccccacccgccgtttactactttgttccttgggagtcagcctaagaaagaaagaattttactccttgctgctttttacctattcattcactgagttctacaagtgcttgaataagaaatggcaatagaccgacacaaaataagtgctggatgagtgttgaatgaatgaatgaatgaatgagtagtgcatatacgggcaaaactgcaccttttagaagtcatttttaagacacagtgtcctagaatgcatctaaaagcagagatagcttgtgtaggacttagaacaatggtgagctccacacaccatgtgaaaagcattcatgtactttggaagcccctacctagattatgctacattaaagaaaaagcccaggcagaaagctgccataggtaacggcctccacagagaatatatgatggccacccttgtcactgcagggagtgttgggtaaccaaggctttggagttaggggaacctgaacccgcatgtcagtgcctctcctcactggaggggcagccttgggcaggctacagaagtactcagccgtgctccttcctggaccctgtagccaaagggggggaaaaaaacagcactagtgatgtggtctttatttaaactgttcacatcttgtttattctttactttttcattaaaagtattgtattaaagtatgcatctcaatcgctgagttttttgtcacccacttaaatttcactccagtggtgaaggcttactcacggcagcctaatcccagctctctcgtatctcttcttcttcatttgaaaaataggataatcatttcttccttatagggttgttgttaggatttaatgagagaatgcagtgcccaggcgctcctaatatatgcttaataagtgggagatgttattgttatgagctatttacttagcatcacttaaaaagggaatagtgatattttaggactgtccttaaatacactattggtataaagtcaaatgcttgatatgcagcttgtggaaatgatacctggttgcctccaagctgccctttattgctcttgtttattcgtctgtctcatagccagacactgctctgtcaggatacagcatgatgtttgcataacgggagtccccgcgagaaccctggtcccacagagtcatgggagacccttgtaggagcttgattcccatgtaggccagtacagtgccagtgcccataagttcagggcgaacagcagatatttacggcattttctttctgtgctgggcattgcctgaggtggtgacagtgtagtggttcaggtcatgatactgccttgtgggagcagttgactggggttggggggtggtgggagcacagaactctcagagtgatggaatgcctgcaccatggcaagaatgcacagggtgctcctgaaccatagagaccgcctgccttgtctagtgtggagggatcactttattggagtaagcgatgcctgagctgcagcatggaagtggttaggatattccagatgggaggaagggaaaaaggtgtttcagattgaagaagttgtgtgcaggggcaatcagctgccagccagcatgtgcatcgaggtgtaatgatcagtgccaaacaggaaagcgtaactcacactagttattttcccgggggaaatctagggaactggccacaggaagttgaaggactggaagggcaaaatgaaatatcgaagccctcctgcagctggggaaacaaaggaaaaggttaaggtggtcagaaactagaacctgtacctgtggaagaggccatgcacaggtgcggcccagccctctcaggagtagaggctgctgcctgcctggctgtgctggtgtctcaggagcacgcaggaggcaggagggtcacgcggagctgggagttgggcctctgcagaggggcattgctgctgctgctggttcctatgacggtgaatagtaggtgttgaaggaagatggaagcagaactcacttcccctggaactagtggctgctgccagtatgaagggcctttgcagggaaaatgccacaggaaccgcaggccaacacaaaggggcaagtgcctgtccccttttctgccttccacccttcttagtgaccccttctgaggagccaacaggaaaccagttgacaaagaagaaatggagtgtgtagagtcccagcctcaacatcacaaggcagcatagagagggtgcatctggagctgagagacacaggagcttatcaagaacgtgggatggcctcgacatcagcgcatgcgtaaggtgagaggctggagctggcacagggtagggccctggggaggatagcacagtaacagcagttctctgtcatgcaccaatgacggcaatgcctgatctatcaggaggatgcctccctgtcttccttcctcctagagagagtggcattaacaagtcagtgtaggagttgcatttattacacttacaaatagtcaaaagtgatcctgagcaattcattgaaaatatttagctaatgatgaaatagaaatatctttcttccttttgttttctcttagtaaagcacttaattgtttaaagactaaaggaaatattaatacttagaaggctctaataatgtaattctaatttaatgctttttagcacaaaaaagattttgactaatgtgtttagtaagtaatggttttcctgagtaatctttacagcaagtaaatgacttgagatcatttattagaaactagtgaggtatgtttttcgttgttttttccttgtggttttcaagggtgagtaaaaggacatcaataaaacagtgaaaggcagattgacaactatctctgctccacatctccatccacacattgttatagaacatttgctctaggtgggactctgtaagggggggcaggatgcagcaagccgtaaaaagtgacctggctcctgccctctaggaactgataatggaaatgaagacactgggtggacaaagagcatttgagtatgactatggcaacacatttgtttattccggatagaatcgaaggaaatatgagacaaatgggacctgtgcaaagatatgccttttcctctagttgatgacccactctgggagttgttacttacttttatgttcttttgctgatgaaggcaagaatccctcaaatattgaaaagtaatcacacaaagtatggtaatggtaatgtgtataaatcaataatgcagtttagaacaattaccaacgtaactcccaggtgtcttttctcacagatggatttttatatttgctagaaaataacaattactttagtatgtatcactaattaaaaactgttgaataattttcaacagatattaagtaattattggcaattccatgtcagcaccagtaaataataatctcaccttgtatcatataattaaaactacaatggccccctccacaaattttaagcagtcataaataattccaattgtgcacaagtagcagccacgcattcaactcggttttgtttgtaatttaaaatgacatttttcatttgatggctgatttatgaaattaaaaaaaaatgaatttacctttcataatggtctaatgccctttggggatataacagatgttcgactgcccaaggttggcagctgggcagaaaaaaaattagccaagcatgttgatacaagacctaaacaagaaaagggtagtaataatgggtgtcagggtaaaataaattaactgaaggtttgccgtagcgtggtcctcatgatctccatcttgttgtgtgtgggtgcatgggctgccgtctgcaggctcccctgggcatctgtctgctcctcttcccagtcgccattgttatcatggacgtagccgagaactggcacagtgctgcagttgttttttcttctcctgcaagggaacaacatctaggaaagagggaagatggagactcctccaaatgccttatgcatctgtcctcccgtggcctcgcttcccccagaaggacatggtagcagaggtggcaaggatggggagtctaaagcctgactacaaagcagattcagttgttccacctatctatctaacaaatatttactgggcatttactatgtgccatgtactatggttggtgctgattttaaggtttcctgacttttaaaaggagacgcaataaactttctttattccttcacctcaaacaatttaagacctattgatttgtatccataaaacagtatgtggccattgtccatttctactaaggtgtgaatatcagctattatatagacagaacatctgcaactctattgattcagagatatcgttctgggtcatttaagatgtctgcaacctccttccctgtagatggataataaccctctgtactggcacctgccttgggttatttaggtgctttcaggaagcagatggtaacgcccagtgaacttctaactgcttgttcagtgatatctcccctattcgatcgctatggtccatgacaggagagtccatgtccgtattaattaacaatgcatttccagcaattagctcagtgtaaatatttgttcaattaattattgattgaaattccaaaacagaaaaaagggcagacagaaaatttgccagcaactcttttagtaaagcactttcttgtttaattgttaacttttttgtttagtaaacgacttcattgtttataactaatatctctcactttttataatcaagagtatacatcttgaaagataaatatggccatacatactatatcccaccctaccccactctaattaggctcatcctatatgatccatccttagagtgtgtacttgaaactatcgcatactaatgcacagagtcaacctggagtggaatcctctgcacagaattcttggatgtctagctcctgggacacatcaggaaatgctcttttttgagctaatgggcatcttcactcattgaatcaagaaggcatattgcaggtgtacaaacaaatcaaaaaggattttatttatttattctatatcctcaggtaatgtggggccatacgtagggtaggattcatgaagaggtctgggttggaaaagaggggaggcaattcaaggcccctgaagatcacagggaaactagaagggctttgggtttggagccagccaaatacatcccggctcagtggagagtttgtttccatctgtccaccagaattgaggaggcaggttctggagctttaaatccagtgatagctgatccaagcagtaatgtcaagtagactgtcttccccaggaggggtgggcacaggagaggacctataagaagggagcaacatgagaaatagaagatcagtatgtctgacttggtgtgccctcagctagaatcctagtggcctgcagttaactatggcagcagcccagtgtgatggaaggcatctgggtttgggtgtcaggatgattttagtttgtatcctagtccacctctccccatatataagaacttacctattttttctaactttgatgaaactccttgcctttatttgaaaatggggaaacagtagccatccctaaaattattggaggatgtgatgagatgatggacataaagcacctggtgtggttctcagcacactctagatcctcagtcaatcttagatccccacacatagtgccaagccagcggaatgggtgatgctgaaggaattgaagctctctctaaagtacacgtacttacaaagcaaacagattttcaaacatgaagggtctatgacttttggaatccgagaacaggatttaaagaagtaattgcaatccccattgtctcatctggtagaatttacctaaacaagtggagtttcccattttactgaaaacaaaccaagcaggctaaacggttttacttccattttgcccatcattctgtgtttgtgacaggagactgctttagagctgtgagcttcaccttctatcccttcctggccccaaggctctccatgggaattgtgaaacacagaaccacaggtgtctccaaaggaagcaacatatcttttcttctccctgcaaaagattcatataggctaaagaaattgcatgaatacatatcgctttgtttaaataacacttggttttgctgcttttaatcattggttcccctgagcctggcatgctttctgcagcacacactggctgcatacctaacagatattttgaatacaacagcttgactcccctgctgcttggatgatagcaattgcctaggtgttccatcctcttccttctcccccgctctatggttgcaaggagatttcaagtgcaatttggccttgcacatcaaacagcaattttcctgcagacatcacaacctccaaaaactctaccctaatcaaatctatcaagcccaatttaggggtgagcttgtgtctgtttatcaaggaaatggagttgaaattgtcccctttaatggaatcacagctgcccaccataatctttcacatggatgtttgaattaatagtaggacgtggcccgtgctctccaaccttggaatttgattccggttataggaaattgctataatttctgttgggactctcagagatgttggggcatttggggctggggttagaattaatatgtcagaggaatttaagaattcagaagtggttgggggaagattagcacttttacacaacacccaatgagtcacctctgcatcaaatcaaacctgctgtgacccacgtgaactacttttaccaagtcaaggagaaagagcagaggaatgtttttttctgaagttcaaattttaaatgagaacacagcagatatgggtagaatgctatttgtccttctgaagtgtagggcagctcacttgaatcaattgtgtgttgggagttgccatactgggtggccagcagcccagctgagatgtccaggtcatccctgagcgagggagaaggccagtagccagtcctggggcccactcattcactcccattgttaccttgggacattgtatttctcctgaggaagcctcagtatccccttagaggttgtgttccgctcagcttggagacagagcctgtggcagtttcgccatagcacagggtcatttcaccttttaaaatgcccttaccaaaggacattcacttcctctttcaagcaccttagcaccttttgtttatatcttgctatgtagacccctttttttcttgcacatttttgtgtttgtatcccgtgtcatcctcatgctacagaagggaggtaaaccattcctgatgcagtattgtaaatgaggaaagcccagctagatgaccttttcaattaatggtggcacgggaaccaggccgccttgcacaaacccgtgctcttcccgtaacacgttctgacgtcctgtcctgaacctttctctcaatctccttgatcagaatgtgagctgggcccatctttcctgaggcagcatccatgaccccagccctgtgccacccacacagacctggttacctctgacctctcaaggaattttctcctcatattaccctcccctcaagaattcattctgatagagggtatttcagggagacatgccttgtataatttttttaggtgcagtataataaaaaaaattaaaatcctaaaaaaactaattctgagcattacaatgcataggtaagagagagtctctttccctgaaatacacctgaagttttccatctttcaactgacaataaaagactcctaaattagagaatcatagacatttaatacatgtggggagagaacctattcattttcttcaagagtggctaatgcctctcagaaaattctcccatttagaattaattcagcttttctcttggattcctttcttgtttcctttcctcctgcattgtcgtgcctcttttcattttacttagggccatttgcatgaaaacagcatttcagctacttggggttttatctgctgccatttactctccctcagaattcataattccctgctatcgcctccaactctgcacccaccacgcttgggctgccttcaggtaggagggcacatgccacccatccccatgagcagcaccctctgtgggagcctggaggcctggctgtccccagagtagccttgctggacagaaggattgcctggtaagtgatgcgtgggggttagggccgtgagggtgtgtggccaagctctctccctgtgccatcagcagctctgcccttgtctgttatcaatggtcggtatgtgtggggagtgcagaaagctgtggctcctttctcgtgcaaacagagtgctgcgctaaccttcctcactgcactccgtatggctaacaaatagtcagagcctgagaaactgtgaaaagaaagcgagaaacaaaaactcagtgttattttcccccactttatacaattgcctcagattattgattgagctttatccattatgctgtgcaacagcctttgctgctgttgagaattgtgaaagggtgtctgttactcaggagagagcctgatgggttgtggatgtgtttgtgagcagacagatgcagcccagctccagattgtcgagtactgaaaggactataggcatcagccaataattctagcatgtcatgtacctggcaccctccatttccagacacttcacagagctgtgaggtagcaaatacaggacatttgaatgagattttccccctatggcaggaggtcatcctcattcaatttgtgggatgttttattcctttcactgacaaacttaattgagaggggacattatacacagagtttcctggcatcttcacgcttcttcatcttttgccacctgtttccttcccagaaaactcctctcttgaagtttgtcactaacgtattttgggagtgggtttttttttttctttctttttcagagtctcactctgtcgccaggctggagtgctggagtacagtggtgcaatcttggctcaccgcaagctctgcctcctgggttcaagcaattctcctgcctcagcctcccaagtagctgggactacaggtgtgcaccaccacacccagctaatttttatatttttaagtagagatagggtttccctatgttggcgaggctagtctcaaactcctgacctcaagcaatccgcccacgttggcctcccaaagtgctgggattacaggtgtaagccactgcgcccggccatcactgacttattaattatcaaataaactggctgaatctcaagccaacctacttgtttctgcagcacttgctcccagccaccagctgctcctctctgtgaaatctgctttcctggccctccagattttgaccttcctgcctcccccgaacctggctgcctggcctctgccccttgtgggctcctccgccttgtctgcctcctgagtgaaagcattctctagagttctgtccccaacctttctcttgtcctttcttttctttttatacattcttttccttggtgttctcttcacctcccactgtccaattatcacctctgtgggaatgatgcctaaatctgtttccagccttgactatttatccaaaaatctcatcttgcatctataattgccttcacagtattaccagctctgtcttccttgccccgacataaaatctgtctctcaggcctgctgatctgttgattttaactttgctatttcgtaccactccttttcatctccaccacctgcatcctagtttggtatttattgcttctcactcaaactagcagaacaaacaattagttaatcactctcccttccatctcttgccctacacacctctgctagattaatcttcccaaagtacaactctgaccctcacactttctaataaaaagccgttaatgatacccttatttttgccaggtaagttaagtccagcttatttattgaggcaggggtgagggggttggggtacggccacactcataagtgtgacgtctgctgtttcctgtgcctactctggtctatctcaagccctcaccttcttaatcttcacgcgcacccagctttcatgccataaagggcaagagtagtttcctgaacatccacactcagtgagacctctggatttgatcctgccatcccctctgcctggatcagcgttccttttcccatcccatccacctcaccacctccttgcttacccgacacagtctttatcatctttcaaaactcacagcaagggttatagcctctgcaacatcttctctcagccaacctgacagcatcagccattcccttccttgtacccccaggccgcatactatgtctctattgctgtggtttgcatgtgtttcctgcaaaattcatgtgtcgaagcttaatccccactgtgctggtgtcaggaaaggggaccttttgggaagtgattaagtcatgaaagctctaccctcatgagtaggttagtgccttgtcaaagggctggagggaagtagtcgtgactctttttcgccccttctgaccttcctgccatggaaagacacagcgttccttccttctggatgatacagccacaggtgctctcttggaagggatgacatcaggcattaaacctgctggcaactggatgttgcaccccagcctccagaactgtgagaaataaatgtctgatttttataaattaatcactctcaggcattttgttaaataagtacaaatagatgaaacattcacgttataatatatgctcctataaagtagaggccatcctcaccatcttcatcactgtagccccagcacctagcatggaataagcatgaaatcaggaccagcctcaccttccaacctgacagaaattcttttctttacatgagcatgtactatgcttccttctgtctttgcttttgctctggtacttccttcccacagaaatttcctctctattatggattcaccagaattctacccatcctaaacaaagctcagcgtacatatcttttcccacaagaagccttgtttgatctgttttcattcatcctacatgcatgtgtgatgtgtgtgtgtaagtgtgtgaactcccaaacatgaaaatcgtatgatttactgttatccgattatattagaatttggattcagattttaaagctttattccttaatttaaaaaaagtttgccctactctaataataaaactcatcttgcaggggcaataacactaatttctaataatagatcttatgatagcatctggaatacagtaaatgatcaataatgttaattcatgttctttcttctttaagagacttaacattttatgacttcagcatattcatacacttctttattgtcaataatagaacaaaactcccggtggaagaacaatatcttattcacatttctcttgccagcagtgaatatcagagattcttatatacttgtattgcttgggatatttattaaatttaacggagcaaacagatttagaaagctttatgctttaaaaaagaatatagttttcttatttgcacaaaattaaacatgatgtttatggtcatgcctataaaatgttggacttcacgcttttgataaggaatataaccacatgataacatattttctatgggaaaatcagatttgacatccattgtttcaatttagtgttgttagcagaaattttgtttcttttctctgttgtatctttatataagcatgaaaacatgaaacagcattgacttgacaacatttttttaaaaggtggccaatgaggtaaattagattacctgctaaattccatgcagtaattgagtttttctgtaagtctaagtgcaacatctttgaagaaatttgttttccactatggggcaagttgtaaagaattgtttatatgcactcaactgctatgacccagaatcttaaaaatatctaataatcataaaatttgaagctctctggacttcagtttttcttttgaaaaaagatatgtggttaaaactgccccacttagattgcaatgttgatatgaaaagctcatgtgagcctctcaattccagagtttgtctttgtttccacatccctgaagcctagtagagtgtctggaagagaaaaagtgctcaacaactatttattaaatatataaagattatgagaaagattgttgaggatgttaaactgtaatataatataatttatattatctgtactaccctctcattttagatggggtaatgaggcccagaaaggagaaggaatttgcccagtgacacacaggaagctagtggcagagcgaggagtggttcccggattttatgcttccaggtctaatgctcttcacacacatctcaccgtatcggtcatgtcacagatgacacacactctctgatattagaaaaaccagtccaattcaactgatatttatggatttcttattaggctccaggcacaatgctaagcagtgcaggattacaagatgagctatacagtctctgcttttaagttcacaaatttacatggaggagaaaacacataaaccactaccaaatagttattagggtataaatattgccatggggatataaagaaactgctgggagctcacagtgaatggagtcatgatgctggattacaggatgagcaacgttaaaggcctttcatgggaaaagcgttttaggctattctttggaagaaacacagggcagtcaagctaagaagagaaggaacattccagtccaaggaaaagtacagagcacaaaggccctgcctcccccatggctgtgactgaaaggagttatagtagtaattatggaataaagactgagaatatgaatttgtccaggtcatcaagggccaggaataccacgcttgggaatccagactttatttgatagggaatgggagcttttaaaggttatttgaagtcaggcactatatttttttgaaagccattccggctgccgtagcatgaaagtggagggactggagacaagaaaagctacaaggccacttcaaaatctagaaagctttctccaaataggaaagtagtgctaagaacagaaaggatacagcaaataggagaaacattatggagaagaattagcagtgtgggctctggattcagactggctgtccctttgtgtctttacgcaagttaattatattatttgtgcttggtttcatcatcagcacaatagtgctagagcgcccactcacagtattggaggtgtaaagtgctaaaagggatgcccgtctcatagaaagatctcaataagtgttcatggtggttgttgaaacaaagatgttaacacagaaggcaagtctcaccagagctggcacccaccactgtcttcagtgcctagaaaagtctttggcacctgttaggcattaaatattttttattgcttgtattgtatcttctttgtattttctccctttatacctttcagacatgatcatatatgaagttatttgcataacgactacgactggagtcttcagatagtttgtgttgatatgggaaagattattaatgatatcatgattttctctaaaagtgactatcactttcaatgtgttggcagaaggtttgggaaacaaaatgtttaagtgaaggtgaacattttggagacgtccttccttgaatttgatttacaagatcagtgagctaaggttcagcggtaatgattcacaagcctggggctctgtcttggctggacaggtgactcactgggtcaccagagctccatgctttctctaggactcactttacttatctttgaaatgggatttattatctgacccctagaaatgctatgttcatgaattgatacacattgatggcttaagaggaggaaggcagtaggcagctgataaaaccctctggtttacaaagtttgcacagggtcctaagataatcaggaattgacagtccagttgtatctccaggggctgggattctctttgtatttgttcaatcatttgttcgatcaggattcattttccttcattaaaacatcattagtgaaaaatatccttccagccaccttcagcaaagcatctaagatgggccacacacactgcctagcatgatgtaaataagcgtaactaagacatagtctctgtgaacttaagaaagccatatctgttaaaaataagttcaatcaaaatttaaaatgctctcatagagatatgtacaaggtgcaaacaaagaaaattagcagtactcagtggaccaggtgttggtccggggaagtgtcacagaggagtggtcatgaacctggtgtctcagggtgagtcacatcacatgggttgtagggagaggagtgctcctagctgtgggagacagcacgtgcaaagctttgacaagtcatcactgagaagcagcacaaataggagggggaatattcaaaattaggctggaaagagagaaaggagtcaagtacgtagaagcatgcccgtgcacacgcacaaacacacccagaggctggcgggacaaaagaaaaagcttattggggtcagaaagacccaggctaaaatcccagcttcttgatcatttcatgtctcaattttctcatcattgatagaagatacatcacacctacctagcaatgctaatgtgaatagaaatgtagcagactttttatgaactggaaaataaaggaataagtggatgcatgtgcaatatgtggatatattagcattagcattagcatatatgcatagaccattctatatctacaagatgtgtgcagagagagatactaatggatggactgattgattggtttggtgatagatgctcaacacttaatttctttagtcccttccaggatttctacaaaagtctttgaaagaatagtaaaattatatgtataccatgcaataacagtgctgatgggtcagctggtaagtagccatcctccccgcactgccagctttcttgggagatcttgggcagctgattaacactgcctgtgtctgattcaccttttcaagtcatagagctgctgctctgcatctagacttccctgtcccaagggatttgctggcatcagtccctggccatgcctcatggagcagctgatcactgctgtggccccggtgaggccacccgtataagactagggtaccagggagcatgggagagaatgacaggcgggtttcacagttatgcccagcacttcaaactgtgtttgaacacaggtttctggattccctagatatgttcctcctctccccacttttttgtcagctgttatctcagttttgttgctgtgaaatctcctttctcctttttggagaactcttcctgattttgatctgaggcagctgtcgtctggtgacaaccagcaatttctgctaacggcaccaatataaatcttcggcttccccctcagttcttgtcaaagacgtgggccagggtgcagagtgagacagcagcccttctgtgtcccaaaggtaggtgagctattgggctctgccagctgtccttcgaaatcacctacgagatttgtttccaaattcctgccttgacgtggatgtatgttttgatagaaggttaatgcatacgtgaatacacaactttttgatttattgtcattgtgaacttatcactctttcctttaaattaaaactccctccagatggggatctgtgacacagatttatcgatctgcaataaaacctcactcataatctctacagctgcccattcgtcttctcgagaaagagggttcattactctggatgtcccaggaatgaaagcaagaagctaactttctcctttgttctactcctgtccctcctctgcttaaggcttctgtcctcctacctttctcctccacctcctcctcccacgtcatgagaccagctgaatcccccaaacacattgactccctgtccccatgttgctcagattccctcatatttcttcttactcccctgtcacccacctcaaagatgccctaccattttgtgggcacccagagagtgctgtgacattgaatctgatttgtggcagtacagcaatagcgtagccctctgctctgctccttccagatgggtctgcaccccccaatctggacaaaccactgtggactctggtagatgaatgagatcattagaaaagggagactcgagcagccagactgataggaatgagcacgagcggcaggtgggcaggtaccatgcttgtgtctgaatgggtaaatgtggataaagaattcttactactctgcgttttgctgggtccagagaaccctctgatttattgcttaggagatattccgacatgtgaacatgatccaggctgcttcccctggtcagcagatggtttggtcactgtgccaggaagcagaagttgctgctatctcagactcaacagaaggaagggcaaaaggacttttagagggatcagatggattgcctagtcagctcagtggagtattgattcagtgctggaattttcttggatttccctgccgaaaaataaagcatgggcatcatctagtctagtggatttccagtggagtgtcatgatacactggtgtgttgcagtcagcttatggtgtgatgtaatattccagtgtgtcacaagtaatttattacttctaataataaaatactaaagtttacaaatgaaatactttaaaaaatcagaacagattcaaagctacatttataataatgtgattgtcactcacgtgaattccaatgtgctttcctgagtaggaatgggatgttgttatggctaacctgccagaaattacccattgtatatagagatctagtggttatgtggccagtatccactactgggagttgagaattgctgttctggtctgtctctccctattaggcaggaggactgtccttagaagaattctaagtcctcatcctttgtgtcctcatagcagaacaaaggatgcagcctctcatcatcatttagaaatagcaaaggcataacccagacccaagcagtgattgctaatgtcaaggcttgaacccaagtgtacaaatcaggatttcagtgtgcacatcccactgaccactacctcctccaacaggcaggcttgaggagcttggggcagaggcaaggcacaggtggaggaagagcgagtgggaaatgaatcatcattaatcactgtaatcaggaagctaccccaagcaggtttaatcaccgcatgcagggagggctgcagagcaagtttatggtttacagtgagcaggctgacacagctgattgatgtcaaatatgtcatgatgtatattgtaaagcagggagatttaatggtgtaactctatggcaggcttagaaatgagctgctgcagagtgagtcgtgatggatgggctcatttacatgtaaaattgccaatggcattgacagcattggtatgtgaggggaagataagaggcacatagcaagattcactcttgtcctagtgttggaatattaaaatacagctgcggcagcatctggaatttgcaatggcctctaaagataaaattgtttttcacctttcagacctgagataatctacatcttttataaggttttctaaaaagtcaccataccgttcctggatcaagtatttacagtagatgatgctggtatgaaattcagttgtatggaggttgttagcaaaccaagacattccacggcttttatctccacccagcctaacaaccacccagtgcgtgtagagtaaccatatgaaagaccagagaactgactttaaaactccatttggtctcttccaaactcatgccctcttgtgttttttctctaccctttgtcagaaagataattagtcagcctctctctctctctctctctctctctctctctctctcttccccttcctccctctcattctcccccttattttctcctctaatgaggctgccattatcatatgtgggctaatgtctgtaatatatgagggtacggggaattgaggtatcctttcagtaaatagtgatgtttggatcacctccagttaagcattcaggcatgaggatagaccctaggacctgaattggctaactgaagagcacttcatatttgccccctaacattagaataatgaccatgtggcattagagcctgccttgccttctctccatccctcctttttcctttcctcctccatacaatgtacaccaggcattgtgctagggactggggcacaacacaccaaatgagctactagggatgccgagaaggaaagagcctcccaccggaactccagatggcttctacaaatgcctgagaggagctaggggagtgcatgggacaaaggtggaggggagctgtctgataaacaggggtgacatctcaggggaattcatatctgaaccaagactgaaggggacttgaaggtagcaaagcaagggaggccgaagtggagagggaagatgactgcaaggaaagaacggtgcccatgtctccacagcaagaaagcatttagcaaattcaagggcctgtgaggagcttgaggcaggagcaaaggagcatgtgaggagggacagccaggagatgaggctggagaagtgtcagtacccctgccagtctccagctggctcaaaggtggagactattgcaccgtaaggcatcccttggtttttatgacaacgtttcagttttgccctatctatggctttgcctttagtgagttgggtcttatttctggacaggattatcaattgtggtaaggaagttatgttgacaatcacaaaagttatcaaagttacgccttcgggggtgctcactgtcattcagcgtgtagtgctaagtgctgaggacttaccaaacatcaatttagtttaaggtatctcatgtattttttcagtaaccagatcgttgccatcatgacattgaatgatttttacacacaaactaatagcatctgtgctttatgattcaatcattctttcgcaccttcaaaacatatctagtaagaacctactaagttcaaggcacactgctacgtgctggggatgcaaagatgaataatatgagattccttctcataagctaatgaggaagacacatatgcagaatcatggccaactcatcatagatggagctcctgtaaaggacggatgaaggctgtagggagtacaggaacttatggcctttctctgggggagtctgggatgctcaacaaaagagatatgtgagctttatcttaaagaatggttaagacttttccataggtagatgttacagatgaggaggcttaaagagtttggatgcagacagctcagccacgtggagtttcactgagttcccccaataaaatcaaagtggtattataattattagatacattcagctctacaaatcatcttttctttcttctagaaacttgactgcaacactacttctgtgatgcaattggcagtataacttagtggttaggaccagaacctctaaaatgacagagacccgggttctaacttcatctttaccatctcatagttgtgaggccttgggggagtcccttcaacccacagccctcattctcctcattcgtaacagtgcctacttcacagacttcatggagtattaaaagaggtaatgtactggactcagtgttgagcccacagtaagagttcaacaaatgttagccatgtatgattaataataatattattattatctgtcatttaacacctaatgaagcattgactgaaccacaacctagtgactttatagagctaatgtacttcccagagagcttaatagagcgctccactcttctctcttcagaaagaatgtgctcccattgcagtaaatcaccaacacaaaagtgggtacacatggtccctattctctgctggccactttgggttttactccaattattgtgctatgttccctggtgtttccctttctggctactcagctgaaaacttcctgaatgcctagtttacttccccttccagatcattaacaaagcggctctgaaagcccacacctggcaccactccaccagctcccaaataggtgcctccccagctggtcctttgccgaaccagattgtgtgtccacacaaatggttctgatcacactcaagtgttgtcatcctgaaagcacaggttctggaacctttccatacggtttcagatggcagtacattttcattcctcaactgtactccctgcttaaaaaggaaaaaaaaataaaagaaagaaaatgtatcaatggtgtggatcctaaaaggtcgcctaatcttgtccgttggtaatcaatgcaaagaaaataaaagtaaacagacaactggagtggggaggtgagcggcaacaccatttaaaaccatgcccactccttgctgcgcgtcttgcgttttgcctccactgtcctgccgggctacgtctgcagcctaatccaccacctctgcagctgcttttcattcgtgttgctacactcactccagcgtccagtctagaaacctgggctttcatcttgatttctttctattcctcagccatcgcatgcaagcaatcaccaagtaaactctgacaacccagcttcctatatatctctccaaacccactacctctcccagctctgctgccagcttcccataccaacacactgcgggccatggattttgatcttcttcattttgccctctgccagtccgttttctattgagcaatccgagatttttaaaaatgcaagcatgatcacctcgctctgcaggtagaaatactcgtgtggcttctgtcaccctcaggatcaagctcgaactcctccgcttggcttagagggaccatctggactttcccggccctctcatccccttgcggcctatggctgttcttctgcccccgccttctcccacctcacctttctgggtgcactggctaactacagtttttgtgtctgataagagcttacaaaggactgccttctgggagctgtcccaccgtgcccgcctcagctctctgccctcttgtatgctgggccagcttccccaccctccatcccagccctcgcccaccctgtgctgggccagagctgctgtctccctagctgggctgtgcgcaaagagcaggcaccatccctcctccccacagcaagcttccagcagggttctggagcacagtagacactcagtatggactggtagagctcttaaagaattttcttgaagaatccttttgagaagtaaaatgaagccagcgaggaatgaaaccaaatttgtcctgtgctctgcagaggaaagggggtggcttacccaacccccacttcccccctcctgctgcccgcgcctctcccccagcccctcggatcaggatccagcctctcccttctctcaacttgacagtcagcagaagggcctaaattgggatattttccagaggcaggttgagtaagcactgactgagctgaccctgatagaaatacttaagaagctttgcagggggattaagcggctgcctttaatcttgcttccttccgggtggccgcggtgggagcggattccagcgtgttggcagggctgggttgagggtcctgagccccagctggtctctgcaggaggcggggcttgtgagctggggaaactgggagttggagatggggagagagatggcggtgaaactgaccatggtttccatttcaacctttgaaaacctaactgaattgccttctcttttctcctcctttattttcaattcaggaagctttcatatttccagatgtgaggtgctctcattagttgctggaaaattctgccttttttgattatgtaacgaccaaggctaaatccagagatgcataagcggaagaggatttgttctggatcacaccaagtgaatccatggagggaaacctctgaggctcagtcactcatcatgaaagcatctcagatgcaacaatcctgactcagtatgctgttttcacaagggtcatgtggcatagcctgggagtacaatgtccatgccttagtcccttatactctccaaataacagtcaaccccttagattacctaccatcgtagttttttaaaagccgtggaagaggggaaatgatatttttactaaatctggggtacgtatcttcctggataccctgtatcttagaggctttgttaatagagattacagacgaaatgacggtagttgacttctgggtggggaaacaagttcattgaatattaaagcaagaaaaaaaaaaaaaggaatttaaagattattagtccaatttatcactggcaaataaggaacctgagtcttggagacctgtccccaaatcgtacacctctataacaaccctgctggattagaattagatcccactttctttcagccataccaaatttgaggttttagaggcgaagtgttctgtaggtatctttcctaggagccctattcagagctaaattgggctattcatcatttgagcctcctttcagcttgagggcttagagttgaggttttaggtcaagggtccatacttagcatagcctaaaacactgggcactcaacgcacgttaattaaataaatgttaaattcatgtggtttagtttacatgtattctgagtgggtttctgagtgtctggaacttccaaatattttacttaatcttccctgaaatttttaactatttcctctccttcctgtggcacagcatctatttacaagtatttctgattctggccacatgttgtgtgggcattttaaaacccagggggcacatggggctgcatcttctaattttggtttggctgggtctattattttaggttttaattttagtttgttttggtctctccatgattactcagtctttctttgcattcgcatccaggctgttctgagtacctgtatccctaaaaggctcaagcatatcattgtacttgtgtattaattatgtatttcattcattactactgtacctcgagcaatacgaccttagggcatatacctgacatttaagactaacaatgatttcacatacagcatatctgctcaaaaaataaaatcatcattagagatttagggggagtgagaatttaatggatagtactgactttttttttaagcaaacacttgaccctaaaactgcttctttccatcttttgcttcagcctgacctagaagtagctttgacttacaactgggcacctcaggggctcctctcccagcagattcactgctgctatcatcccttagccaatgttcatgtttattggtggcggggagagcccacctgaacattcaaggaatactcagagttttagtgcagcatgcagctgggtatatacaaaggttttcctgggaggggcctctgagcttccatgaggatggttccctctgctccacctccttccacccctctggtcctacctttctgagctgacacattgtccagcaccgtgaagttggcaacacatcccaattaacaataattgccagcccttgcgggcactgactagactcatcgcagcccctgtgtaccatggtttacactgaaagacttctcatgggagctgagaggcccttggggctggtgccagctcctgttcctgggtttgaactgcaccacttagtctttataaataagtgtcagtcccattgactgtgctttattccaaacagatttttcaccagcaacaacactgaagatgataggcgggggagcaggggtgttgacagtacacacttgacacacatcagcggcttttggcacccaccagtcatcaactaaaggagtctgggagggacaatagactgaaatctccctccttgcttcagaacccaccttcacgctgcagtgcatcctttacagtgatttccagggaattaatttaaaattgctcgttcagtcctgtcggtatctcctcagagggctcccaccacccaggcctgcctcatttcaacccagactcgctcccattgactttgggaaataggtaaaacatacttaaacaaaacagaggacagtttttaaaggagttataaagatttttacctagtgacatagactaaaatctcaacaggtgcaaacttattcttcctggaagagggactatatccctcttggctctaaagacatagatttgcatattgatagaatccatggatttgtatagctggatagggatattagaaaccattaatcaccgttcagcacagcagtcagcctcttgaaagttgttgggggttgggggcaggctatttaacatctagtcaagcagaaatactcaattgccaaaaacaggccacactgattcatccaacagaggtaccattcattcattcattcatttaatcattcacaggatagctattgcacgtcatttgtgtcaggccttatcggtggctggagataatgaatgtgaaaggcggttgctatcgtgcttttacacttaccgatcatctgagtgtctgtccttctatccagaatctatgtggactataatgggaattacgaggtcttctctctgccttttactagatacacatctttgatctccccgcagagatgcagtacacggaaaaggaactcagtaccatttatgctggttgttctgcatgagttctgggatttggggcttcaaggtcacacagctgtcaaatctaaagaaaccatgaagatacctagctatcatcccctcctaactgtttaaactgttgaggacactgagatttgaagtttagtgtacctgcccaatgttgcaaagctaaattctggcaggggtgagaccacacatcacctgccttcatggcctgctggttgctctgtctactctgaagttcatgacgaaaccccatgagtccaggtgaagaagactgtaagagaccctctagttcaaaacttctctactggggagaccttgtagttcaaagcttctcaactttggctgcacatatctagggacccgagggagcatgccacactacagaagcctgagctgcacccccagaaatgtaagtttacttggtttggggtcaggtctggacatctacatttttaaaagatgccctagatgattattgagtttagggaaaactcagataaaccacacatcctactgtcctgctcactcacatacccgctcactcattcactcattcattcattcatttgttcatttcacaattttcctcaaacattactttagcaagagagacatacataaaaaatctccaaagtcatccacatcctgtgtcaggaaaatcctgccaggctgttggcacaccagaggcactttccaagttcctcacccagcttttaaatatcactaataaacagcactagccagcatgcccatgaaagcctgcagcttgtccccatttccaagctcactttgcccaggagtcactctggagccctgccaccatgggatggaaacacgtccgtgttcggggctgtgacagaagggcaccaggagcttgttgctctttatttacctttaattagaattttcctgtgtgtctctgccctcccatgagagcagcagcaccctgttaatgggattatgtggtatggatgctgctgtggacgtgtgggccgctactccgtctctgaatttcacccagataattgatttcggtctgttccctgacactcgccttcgtggcacagggtgttattagggcctttgttccatttttgagtgacaaagcctttacatgccagccaagcaaaagcaattgttgcatctctcacttttcttattaactaacagagaattgcaggcagcttgaagcccgctgagagaaataataacataagcggctgcttgggcgcaaagtgggtcctttcaaccacaacagcctggtgagattaacaagggcccctcctctcctgcagccactggatccccactctccatcttccctgtctgtctccctctgcctttcccttatcgcctctatgtctgcttctggaaaccctctggttctctaaagcaccaagtggtccgtggagagcaggagtcctccaagattctgggtaggcctgctccatgtcttaactccctgtggattggaatcacgcattcccatatcaccactagttggtgtttctgtgtttccatgcttgcttttcatttttaaatatgtattatgaaataaatatgtattatgaaagaatttagacatataaaaaaggatgagagaaaatgaacattagtgtatctactacctagattaatttttttaaatggggccaaggccacctgagagtcttttcctgatctgctctccctctctcccacagagttcactatccttaatttgatatctgtcattcccaggcatccatttacatttctaccatatatgtgtgcaccactaagcaatacaaaggattggcacttttttaaacttataaagatattaaataccaggtgtatttcacgatctgaaagtttcgtgacattttttcacttggtaaatgagctggagtgttctgtgatcaatcacaatgttgtacttagcaatccatttgtcggaggatgttcagggtttaaggtgtctccattcattttgctattacaaacgcggccactatgagtatttggattcacacctccttgtgcacacacacaagcctttcctgacatacaagcctagaagggttgtaaggattgctcatcttcaactctagcagtaacaccaagatgcctccaaagggtttttttttttttctaattatgtaataagatgaaatgtagggattggtaatcccatttcacacgcaagtacaaagatgatttctccctgtgtttggccaggaaggcaacagcaatgaggaaaggaaaattacttccccctagtttctattcttggtctcccactatcccaggtacctaagctgtcaagaagcattaccatcatcctaatggaactgggaactcattcctgttcctacttccttggtaactttgttttccatccttgagccattggcaggtgagatccttagtcatgacctgctctttcttgtggtccaggcagggcaattcctgctgtgtgaaaagtactgtgtgatcagttacccagagctctgagctgataggcactctgtttccatggttgcttcagcaagtcggtggtcacgccagcaaacacttgagtctatcctgaatttgcattctcatgctcactaattttgtggaccacaatcaaatacttaacttctcagatgctgtctcctcatctttaaaatgggaatgattgtacatacctttcagaaaagttgtgagaatcacgtaaacaaagcaaagcgacaagcacaatgtttaatactctgtggtcatcctgtaaaaagcataaatgactttaaaatgcatgctttgctctgcgtatgtggcgtgaggtggaggaagggctctggggctggggagaaccatgcccccactgactctctttgtttggattccaaatactagggttggaagacactgacgagttttacaccattgactgatccatgatagtttagaaaggaagctgatttcacagaactttcttaggtctactagttcttaccccaaagaggctagtaaaactagtttctttgtggacaaaagactcaaatgtatatatgacacttctgccttgattctgtacctctcctaagtgaaattttactttgagaaggtagaatttccttcctttatcaataaaagctcaggaaagtcgaaacacttttagagctccctttaggggtacaagaaaggacagggttcagaacccattgtatgctcccaggcacataaagtgacagtactgctatgttgtcttcttcttagcagttcttgttttctcatgcagtcgtcaccccgtttaattacccctctgtctttgtttccatctttatccactcccctctcctcccttcttccttttcactgcatcctcatcctttcttcttcattctcatggcctcctggcacctccacaattcacctgcttgtccccaaagactctcacgcagctttcttgaatgactgattactggaaggaatagaattgttaaaaacaacaatgttttctatacaccagtgtgtaaaatgtataataataaaatggaattgcactaaatgaattatggtttttttaaaaaaacaaattacccacctgtcaaatactattaacgctcaaatcagtgtgaagaataagaacgcgtgtacagagggagcttttcttcctttgtaaaacaaataccagcccctcataacagctgctttcagtgtcttgaatcagcaactgataaggggaaggaaggtagaaaactctccaacaagtcgtttttcatggtgtcaatgtaatgtgttactttcgtgtgtaattcagatgtgttctcatatttgagtgaagggttcattaacttcccattgcttaatgatattccataggatagggcaaatgagaaaggggaacttatgaaaacaaaagtgagagtggaggtgggttttcaacgttcaaggactcatttgcttctcaaaaaaagcggctttgaaagccaaacacacagggaaataccttgtttttgtgaatatgctcaaaggtagcattgatctggacaaagaacagtagcttttttccttcctttctttcttccttccttccttctgtctccctcccttcctccttcccttcctttctgccttctgtagtttattttgttttatctttaatgatgacaggcaggagacaaatgcacttgttcttcaatccagtgagattgtttttccatagaagcacgtctacgttagtgttaggaaaggaaaggacagttatattacttgggaggggagatacactgctggtgattgtcacagggtatcccagagaccatggaaatccttcattcactcttagagggttattttcttccctaacattggtcaaaagtaactgccccttaggcagagcagaagccacacatgtcctcagccttcagcctctcacagctttgttgaattcatctaaatctctcggttttgttctccacgtgatgactaagtggccgatgcagtaggtaagcacgaaattagagggggttaactgtattatacacagatttagctcacctggcccaccagagacgcggctcagaccctggttgaattaaggaatttgctatgaaccctctagctgacctgtggccagcattctaattaataagttctatatctggcttttgttctctgttaactacaaataattcttcttccttgactttaatataatagaatacactctttaaaagtgtcttggggaaaaaaaggaaatatagacatagaaatgattattaatgttcttgcttaattgaaagagtattttcctgatagttatacgtcttctaattacctcaatgtgcattgcttaaaatttaaacaaaacaaaacaaaacacctttgggttagagcagtaattgtgtttatattatttcagctagagctaagtggatttcaatggctaacctcaaatgtaaaaagttgttactttggcctatgtttgcatttaaagtgcacaaatacaagggcttaagtcagaaagacatgaaagcgcatggaatagttcccagtttctgtttgttctttatgcaattcaaggctgtgtatgattacagtgttggttgcatttaagtgctttgttttcccctgggttacaaacatctaagggaggcgggaggataagaggataaagagaattgaaaagaattctcaaaaggcattgtgaagcacatcagctgaggagtgagttataaatgaatctaacagagagacatttaatttccttctacataagcttgaggctgaagaggaaaagttagtgggcataactttacttacaaggaacagcaaattttaacaactccttggtgtaggggagaataattcaagccatttggtagtaattatccattacatttgttcagcacattggagttcattgtcccctacaacttctacataatttggctccacaaatatttgttgagtgtccgctaagctccagacgtagagctggctttgggaacattaggctcaaagaagtaatagcccccactctcaagggggtcacagtgtacaagatggacacataagataataaaaggtaatgcggcaagttctgtaatagtagaaagcgtaaatccttagctgagtagaagagtgagcaattaaattctgcttggactacatttagagtaacctagaatgtgtattgatgtaagcattcattcatttatttattcactcactcattcaaagagcaaatgtgtttttctagcctgtattgtgacagacattacactggtcaaagaatgacttgagtgatacacaattatgagctgaaacatgttgaatagtgaatgaatcttacttaggctgtggtcttcctcagggatgcctttctttatttggctatggaactggggaaagagtaggagtttaaaaagtaaatgagagagggaaaatattctggacaaaagaaatggcttgtgcaaagctctgctgtaagaggcagaactctagatgctggaggacaaggaaggccagtacagctgtagctgacagagcagaaggaacacggcatgtacgttagtttgctagggctgctgtagtaaagtattgcgaaatggatggactacaacaacagaaatttattgtttcacaatcctggaaactagaagtctgcaatcacagtgttggcagggtggttccttctgagggctatgagggagaatctgttccaggcttcttgtccagcttctggtgggttttgggcaatcattagtgttccctggttatagatgcttcatcccaatctctgccttcatcttcacaaggtgttcttgtatgcatctgtgcccaaatctccccttttcataaagacaccagtcatgttggatgagggccccagccaattccaacatgacctaatcttaatttaactaattacacctgcaattattctgttttcaaataagatgacattctgagatattaggggttaggacttcagcatatgaatttttgtatggtggtggggggtggggacaatttaactgctgacaatctgggatgaggctggatatgaggctagcacttgatgtctttggcttcttcgaggactggtaagtcatgttacggacttggttctttatcctcagattttgagcagaagatgccatggtcaaattttcatttcacaaaagtgtcccaacctctgcactgtatgggaaggttgggtgtggacagacctgttgaagacagttgcagccattcgggtgagaaattatagattatgatataccaggatggaaaagatggactggagaaaaattgatagattgggaagatgtttaaaaggcaaacaattaataggaccagttaatgggtttgggtgataaaaagagggtagggtacaggatgacaactggatggaaagtggcatcatttactgacacagggccagacttaacagagaaaaatatgaattcagtcttgactatgaagagtttatagtaccatttaaatatcctagaggaaacagcgaatatgtttttggaggatttttgaggttagaaaagaggtctgggctagaaatataaatttggagattattgttttatatgttaatgcataaattaaaccatgcacaagaataaaatgtcttggggagagggtagtataaagtggagagagcctaggaatttgctttgataaactccaactttataggacgataatgaaggaagatgcctacaggagaatcagaagaagagtgaagaggtgaaagtagccatacaagtcaaaagaagaaaatagttcaaaaaggggcatgatcacaatttagattgctgatggttgaggcaaatgagatggggcagaggagggagttgcccactagattccatgacatgaagacgaatgaagccttagcatgttggcagaagagggaagaagaaggaagtcagcaagataacaataaggagagctagaggtaaaattgacaaatgccatgagtcccagaaaagcaattttaacaagaaggtagatgatatgggagggtggatgatcatcaggaaggacgtctctagactctgaagcagatgtcagagtgagagaacacagagccaaggttgcagacggcagtgtcctcagtagatagacaggcttggacagtcagctacgtcgagggattggtcgtaatattctaaaaaaaaaaaagtcagaaaaagtattctaaatggcgcagtggaaggtgaaaaaagaatggaggaaagaagagcaaaggccaggagtgggagggctgggcagggaggaattttttcatttgatagtgacagagatgagaagggacaagaaccagggtggttagtggttcagtctcaaaagtccctttcaggaggctgtaagaagatgtatactggtcccaaactgccagagtgttggccctctggagctttggtgatatgagctccaggatctgcagtttcttcctgtaggagtagcgtgcttgcaaatccaggtgtggagtttatgcagtcacatggcatggagtagtggcattttatctagctggagtgcagaagaaaggtctgagagtctctgtccctctagttcatggctggaggtggtagtgcccccagggagtgcattaattcatttattcatgcatgtatccattatttcctttattcattcaacaaacctttttaagtagctactttgtaccagactctgaatacacgttgatgaattgaagctattattcccaccttcattaccctaaagtctatttggaaaggggaaaataaatagaaaacaaaatcaacaaacataaaatggaattacatattagaaaactgctatagaggtaaaggcaagatgacacaataggaaataaaaggagagccatacatatacagatactttgagcctgcacagtgtgagatttttaagaatcagatggatctggcaatgtgaatagttggagaccaaggcatcctggcagaagtgggaaaggccagtggggacaactgtgggttcacacacagtgggtgacaaggagtggctgactgttatggagaaaggattgtagaaggggacaaagggatgtaagaggggttagtggattcagaatccatgtgtttcagttcctgggtatcccatttctgtttaaaacaatctgcctgtcatttgtcctttgtggacacattttcaatgtctaatgttttgtccaaaacctgaagccatgaaaccacactacttcccctttatcgctgtcctctacagtgatcatgcagataatccaagatcaggaagtcaactaagagagaaaacaaaagtctatattttcacactgagtagttatcttgaagttcaagttatgtatatgctggtaaattacagatatctggtgtccttccccaaattaacttgtcacattctaacaaaatgatcaaattttctggacagctaccttgttaatttctaagtccattctcgaagctgccctctaccatcatcaggtactaataccctccaggtctcctattcccagacgttggcacacaaaccagttctctactggattaaatttttctcagtgttggatccttacttttctacattttgtaggcagagctgtaagatggttaggctcatgactctggagtcaaactgcctgggttcaaatatctcactcaacatataggtatgtgaccttgaaaagctattaaattctacctgccaaattttccttatttgtaagatgaagaaaaaaaaaaacaactacctctcaataacgtttttaggtctaagtgagatgaatcaggcaaagcacttatcacaaccctgtgcgtagcaagtacgtagtaaatgtcagctgttattatttgtactctcgtcactatcaccattaccaccacgaccactttcactattaacaccagtatcaccaccgccttcaccattattgccaaaattgtcactaccacaatcatcaccatctttgccatcactgcaacatcaccaccatcactcatcatcagcatcactaccaccttcaccatcatcaccaccaccacaactttcatctacattgccaacattaccaccatcaccaccaccttcaccattatcacaaatatcaccaccatcatcatcactaccactaacaccttcaccattaattctggtattgccaccatcatcaccaccaccttcacagtcatcacgaacatcatcaccgccaccttaaccatcattgccaacatcactaccatcactaccaccaccactgttactactatctgattgtgatcacccactgtcttttctttccaggtttcacggcacgtctccaaaccaggacaaggcatacaacttttactcaaccagcttctttgttccctcttttcttctcactaacctagtctctattctaccttccaagtatcagagtatctaaagcccactttaaaaattgaaactctttattcagtgcaattgatcataagaaaattaaagctagtaaaaatgttccttttagccttatgactacttaccctgtcattaccatcttttatttctctctctctcttcctctccctccatcactctccctctctctctctctgtctctctctgcctccctctctctcacatacacacaagcactcacacatacttatattgaaagttcaagatcatataacctccttaatcacccctttgcctaagcttagacccagtaatgagaacttccagagcatcaattctccctatcatttcagagaaaacattttttctgtttaagagtcacttaaaaaaaaaatgattacaaattttgctttagattcatgggatacatgtccaggtttgttacttgggtatatcatgtgatggtgaggtttggggaacaattgatcccattactcaggtattgagaatagtatccaatagtttatcaacctttgtacccctccctgtcccctccctctagaattctccagtgtctattgttcccatctttatgtccatgagtacccaatgtttaggtgtcacttataagtgagaacatgcagcatttggttttctgttcctgcattaattcacttaggataatggtatccagctgcatacatattgctgcaaaggacataatttcattctttcctatggcatagtattccatggtgtatatgtaccatgttttctttatctgatccaccattgataggcacctatgttgatcctatgtctttgctattgtgaatagtgctgcaagaaatatatgtgtgaatgcaactttttggtagaatgttttattttcttttggatttataaccaataatgagattgctgggttgaatggtagttcttagttctttcagaaatctccaaactgcttcctacagtggctgaactaatttacattctcatcatagtgtataagcattcccttttttctgcagccttgcgagcatcagttattttttgactttttaataatagccactctgaccagtgtgagatgctatctcactgtggttttatttgcatttctctgatgattagtgatgtggaacaggtttttcttaatatgtctcttggccacttgtatgtattcttttgagaagtgtgtgttcacagcttttgcccatttttaaatggggttattttttgcttttcaaattgttcaagtttattatgcattctccatattgacctttgttgaatgcatagtttgcaaatattttctcccagtctatagattgtttactctgttgatagtttcttttgctgtgcagaaactctttcatttgattaagttccacttgtcgatttttgtttttgttgcaattgtttttgaggatgtagttctttcccaaggctgatatccagaatagtgtttcctgggttttcttctagcattcttatagtttgatgtcttacatttaatctttaatcctccttgagttaatttttgtatattgtaaaagacagaagtcaagtttcatccttctgtatatggctagccagctattccaacatgatttattaatagtgagtcctttccccattgcttgtttttgtcgactttgtcaaagatcagatggctgtaggtgtgtggctttatttctgcattctctattctgttccattggtctatatgtctgtttttgtaccagtgccatgctgtttgggttactgtagccctgtagtatggtttgaagtcaggtagtgtgatgcctccagctttgttctattattgcttaggattgctttggctatttgggctcttttttggttccatgtgaattttagaatagttttttctcattctgtgaaaaatgacattgatagctggataggaataatgttgaatctgtagattgttttggacattatggccattttaacaatatcgattcttccaatctgtgagcatggactgttttttcatttgtttgtgtcatctttgatttctttcagcagtgttttatagttctccttgtagatatctttcacctccttggtgagctgtattcctacatattttattttattttattgcagctattgtaaatgggattgcattcttgacttggctctcagcttgaaagctattggtgtatagaaatgctactgatttttgtacatggattccgaaactttactgaagtcctttatcagttcaagaaatcatttggtagagtctttagggttttctacatatggaatcacatcatcagcaaagaaagatagtttgacttctttttttcctatttggatgccttttatttctttttcttgcctgattgctgtggataggacttgctgggactcacttttaaaattaataatagtagcttcctaaacattggaaggctccttttcaggtctacatctataaaatttagtaaagaactaaatttttgtagtttgcccttgcttacaaggcatattaacaaatctgatgcatgttgaagtcccagcacaaataggagaaaggactagtatctgcttttgctgataagcaaacccagccatgaaatagatgatatacccatgtcctcatggctggaaaatggcagaatcttagcctatgccgtccacacaccagaaccaggctgggtcacatgtgcattctagtgggagtcccagcctgagtctggtgacttccccaagcctccagaaagtcagggctccaagcaatttgtacagtgttcatgccactgcttaaaacttcccagtcccaaattactaaatgtgtaaactttttagatcttaaagcttacgtagcaaatagctttctcttgaaaaccactccataaattctagggaaaagtcttctggatttgtgttcatgctgtgacttttctgtaaaaatcaggtagcagatactttgactttggatctacattaaagagattgaatcttacttgaccactctttgactaggccagtgttcagattatctccgggtttctgagtcctttaaatattcataaaagcataaaaggtcccaaaattaatcccaaagtaattaattctcccaacattaatttattcctatgtaattatatatataatatatataattaaatataatatatatatgaaaagcctagtacatatatatatgtgaaataataaaatcaatattagtccattctcctacagtggaagctttttctgcatacaggtggatgaaccaaaagaaagcacttcgttccaaaacctactcaaactcccaaattgcccttcaaaacacgccacacacacacaaaagcaagcataaacacttgggtcaaactccgggtgttagaagagaaaaaaaaaaaaaacagagttcatatgtatgcgtgatgcttcctcttctcactcatgggttcagagtaattttttcacttgctaactcaatgtcagagtctgagagacaaaattcagtctcagcagccaggggactgagcatgtgatgtttggcaaagcaatcattacaaagaaacctcacttttaagaaaaaaaaaccatggataccctgaggaggctttgacctgtatatttgttctttgatggtaaaaaggtatcatgattctaaagactcactagcagtcaagaatttactataagccttaattttaatcccaatacaggacacattttgttgtgataaatcccagtagcctatgaaaattaatcttgacttcaccctcagcttggatatgaggcagcttagtgtaggttaactcaaagcagggtctggcattggggttcttggtccctcccttctaattccgtggccttagatgattgatgaaggctttctaagcctcagtttccttggctgtaaagtgaagaaaataatagtaactccttccagagtcacattggagataaactgagggaaggtgtatgtgtatatgtatgtacgtgcatatgtatgcacataaacacacacaggattaaatatatatatagacaagggcgctttaaaaactgttaagttctatccaaatgataagctaattttaaaatataatttaggctgctctgttgtaaggtatttgttgtaatgagatttctcctttactaattgtgaactaatttgctcatagagtgaataaagtatttataacatgttagaattaaagttgtcataaatacccataaaataaagtttttctctacaatagtaactagctcagaaaacattaagctcacaaagtgtatcctattggatgtattttgaacagaaatttatgtatcgttctgaccacatattttagatttcacctgttcacgttttccttagctatattgtgtgatttttgtattgaagaattgtggtgcagtggaaaggtgagctttgtagtcacataggcctgagttttacagtgcactctgacatttcctagctttgtccttgtgattaattcactttctattgctatcaatatctaacaattggcagacacttgatatgctccaggaaatgtgctacatgcttcacatacactacctcatgtaacccccagcatacaccatgaagtagatactaattgtatccctattttacagggaagaaaactaaagcacagagaggtttatatgccttccctaaggtcacacagccagtaagtgacaaaggaatggaagacactcatgggggaagccacctcaggagactgagtgcatctgtagctcacacatgagtcaggacgtgactgtcaaggctgaatgacacaatcatcatgaattgaagtcttttcaaatagtattcagtgacatgaacacacagtggtccttggttggttctctccttaaccctgccgtgttttccattaggccctgtaccctaaaggaaggagctctgcctctttgcttctgaggaggcaggatagcctagtggttaaagatggggggatgcaatattcaagggcataaattctattatgcaagaaaggtaacttcctttttcttcctgtaacaactcaatttctgtttcaagactttattttgcccaaagacagaaatcttcatttcgaagtcttttttcttagaagttttataaattctacttgctcttctccccaccctatggtattctccatttccactcaggactcatctaagttctggaaagcttacatagcctcatggcatgaggatgaggtggaggtagggagaacatctggcataagtacagtctcttctttatcctgatatcttctctttcgtttgttcattggtttctgttcattttctcccttggcctctgtttagtctctgtttaattctctgccacggtgctactcagaatagggaggctcagggcccaccacactcacgtgccttgagctggctttaaaggttgaaattcagtagtaatcaggcttagggcctccttccttctcactctatattttcccaatacccactcccttccacatctatgggcttaactatgacctatcggccatttctttgatttaattccatggtttctgcatctaactaattactgatttatcctttactcagtcaataagtgtttactgaattgttttcatgtggtaggcactgtgctggggttgcagctgtgagtaattagaataggatctgacgacgtggagcttctgttctggtccctatcatcctaatcatccctgtcaccttcatcatcacccccaatgccatcataataatcatcatcatcactataagccaagcatcttcggaatagtgtgtgtatatatatacatatacatatatatatatatatatatgtataatcttcacagcaacgcagtgggatagtaagattattatctgtactttacacatgaggaatctgaggcacagagggattatgtcactaaacacagttcacacagctactttactattagagccatgatccaatctaggcatttttgatctgtagcccataatttagatcaccctgctatactgcctcccattggatatgtggcctaaaacatttgcttctttaatgtctaacaagtacagtggagttgatgttcattatggtcaggggtcaggtagctaaaatcctcagagagaggtcaccaccattgtaaccctggccattaattcattcaacaaacagctttaacattcttactatgtgttcagtattgttctcaatactgaaaaatacagcagcaaagaagttcagctaacatccctgtcctcatggggcttacactctggagactggatgtattataagcagaacaggaaattttaggagatggtagataccaattatttgttttctgccaagatttaacatatgtatttgggctcagatctgaagatatttctgtttgaaaattgaaaattctgtttgaaaatacatgtgtgttgtatgtgtaccctggagtctatgaaagtaaacaagtgccatcgagaatgttgctgggatcacttgtaatctttctagtctgaatagttaggatattcacgatacgtatatgaaaaaagacttatctctaggatggataaacacctcctacaaataaaaaatataaagacagacattcaacagaaatagaagaaagatttaaacaagcacttcacaaagtgatcaaaaatgtgtaaaaggactcaacctcactaatcattagagaaatgtaagtttaaaccacgatgatatattgctatatatccatcagaatgggtaacattaaaaaaaactggcaatactaagtgctggtgaagatgtgaattaactagatctctcataccttgctgctgaaacctaattggtacaaacactctggaaaattatttagagctattaattacagaatctctcattgttcctctcagcatagatttcccaagcatagatatatacatgcaccaaaagacattttacaaaagtgttgatagatgcactatttgttttaactccaaactggaagccacacaaacataaacagtaaaatggatatatggatagggacatatccacccaatggaatattctaaaacactaagactgatgacatacacatgtcatagaagagtgtcacaaatacaatgttgagcaaaagaagtcagacactgaagaatttataccaaatgattctgtttatatggagagtaaaaatgggcaaaactgatatagtcatgaaagtcaggccagtgctacttttagagaatgaagacaggctgcaagaataggaggcttctgagtacaggtcattttcaatttctttaactgctggtagtaatgcggttgtgtttaccatgtgcatacttatcaagctgtatgcttatgatgtgctcattttttctatatgtatgtaatgtttcaacaaaacttttcttaaaattaagttatgtaccaccttatatttcctgcttatccttctgttctccaaggtttctcatgaaattctaattctgttgaactagttcgagagcttctccaagccagaattcttgctgtttcatcttgtaagccccctttaaatcttcttggatctaaatagggaatgaattaaaagatttgctatggaaattctcatttgtatatgtaattgtgtagcacagtgcttggaacactgtatatagacagtgaattttgacatgtgaatgaagggatgaattaatgttttctaaatcatattaatcaatttgtttattatctacactagtatgcaatttatttgagcctaggaattcaaactctacttttccaatgagcacattcccctctgtatgcttctctccatgtcatgagtggttggacctttactgagttgctgcagaagtcagttacccaataagggatgctttgtttactttaaatatgtgaaaaatggtttcattcctcaggggattattaattactggtttactaattactctggaactgattttacagaaaaaaatctaggcagttgtttgaatgaatccttatttaagtgagtaattagttggatcaaaataattgactaaattaagaaattctttaatagacattatttaggtgtcagtttgattttgctcctggtgatgtgtaacaaatccattgtgtgattagtaataaagctgtcactcctgaagggatcttttttaaaacaaaaggaaagtctcttttgaggctggaaaagaactcaagtacacataagctatgaattatttttcactttgtccttaaactttagattacagacaaaacttaaaacaagagtcaaggtacaggaaaacaagtacatacgtattaacataaaaactctggtggggagggaatagatatatttcaagccattttggtgtcaagaccaaagtaggtgggagccacttcatgatatgcatttccacacaggcatctaccgaatttgcacctttgtcagggatcaattcaaaaggtacctcctcttctctgccttctcttaccctcatcccctcaattaagtatttagtgattcctaatgcagtgttttctaatatattgtgaaaatcctaaaccactcttctcattataatttgggtattcactgatagactgtggcctgctggagtgatttctttgtaatctaagaaagtagcctagttattgtacagtgagtccagaatgagttactatttaggagagtcacatctaattgggtcctcattgagaaccccttttctactttgcgattaacacagtttttctaagatgaaacagatcacccttaagtaataatactccttctgctacatttggcctgggtggtcccggatcctctgtttgaaggtgtcctagacaagcccaggcaaaggtttttcaacgggccccaactcctgggtggaaaaggttcctgtgcacccgagggctatgcgtggtgttgcgggagacctgtcattgctgcctgccgcgatgccaggccccacgctgggggagccacccgggtcctcacctggagatgtggctctctgtggcgacgtgccctgacgtgggaacacatgttctaactggagatgactttaactgcctgaagtcgaaaaaggttgtgtgtaataccaggttttatactaacccaaaataaattttctctaacacgagttttcagacaggttggcctaatatattaacttctgtctgtgttttgaatagtcaatttcacggtgaaatgagttcttaataatatatttaccacctgggaaacatctcccagccatctggaaaggagaggggatttagtgcctccaaacagagattggatttttttcacagttatttatttatttatttttacatcaggtaaaaaccggaaggacgactcggttccagcatcacggatgcagggggcggggtgtagacggcacaggtcctgcgcatgctcagtgatcactcatcccggaagtcgggctctgtcatgtgtgtcaggactccagtcaacgatcctgaaggaccagcctatgttatattaagtactggtgggaaacacaaaaatagtacagccgagtgtccacctccttagtgatttacatatctatgggggtagcagacgttaaaaggtcagagcaatggctttggttggaaaatagtggattcaattcctgatgtcatgtattagttgtgttgcaaattgctaaatcccactgagcttcattttctgcattttccacagggaaataataatgtctatcttttgatgttgttgtgagattggagatagtgtaggtaaagtgccagtatccagggtcaatatggaagtgatcaatggaaaatatggaacagagggagaaagttaaaaattcatggttgtgtgtgcgtacaatgtcatatgcgcactcaaactgatctgatagaagatattggaactggatagataaaacaaagggggtttattaggttttgaaaagaatagaatataaactatagaataagaatacaaaaaaacattccatcattcattcattcaaaaaatatccactgagcatctactgtgtaccaggtattcttggaggtgctttgagtgcatctatgaatgaagcaaatattcctgccctctttgggtttagattctcaagggaagagtggacagacaatcaatggtaaatgaaataagtaaataatctttttttttttttttttagatggagtctcgcactgtcacccgggctggagtgcaatggcgcaatctcggctcactgcaacctctgcctcccgggttcatgcgattctcctgcctcagcctcctgagtagctgggattacaggtgcacaccaccacacccagctaattttttgtatttttagtagagacaggctttcactatgttggccagactggtctcgaactcctgacctcaggtgatccgcccgcctcggcctcccaaagtgccggaattacaggcgtgagccaccatgcctggcctgtatattttaaggtaagtggttaggtagaaaaatataacagaaatggattaaagaattgggagtttcaggaccagggcaggttgcaatattaacagggtatttgaggttggtgtcatttataagctgatgttagagcaaatatgtgaaggagatgaggaaatgagtcgggggacatctggggaaagaaagtccacctgaggaagcagccagggcagaagccctcaggccatgctatcctgctcagtgtgcagcaaggtcagcagtgcggctgcagctaagtgagtcaggggagattagtgggagttaaggaagcaagataacaggacaccagaaaaggagacttataggtcaccataagaacacagacttttactctgacagtcactggagggttttgcccagaagagtgaaagaatttaatgtacacttgaaaagactcatggattagtttgctgctatgttgaaactagatttgaatgggtgtgagcaaatgcagttgttgggaaaacagtatggaaactgttgtatgaaaatgatgggaggtctgacccagatctgtggcccaggccagggtggtagcagtgaaccattgggagatagtcagtttctagatgtatttccaaggtagagagacacatgacttccaaaagtactgcaatttgagtattagagacagggagggggcagcagatctgactacaagccttcacacctggacaactggaggatggacttgccatcagctgagacagacgatgaaagctgtgttggggagttcaggtcaggccttcagctttaaggacatcgcacttggtgtgtctgttagacacaggtagagttgagagtaggcgattgcatatacactcctgtgactcaggaatgtaccagacacatgcattgggaagttgtgatacggatgctatttaaagccacgaggccaaatcagatttcccccaaggaagtgaatgggaaaaggaaaaacgcctaaggattgaatccttaagaattccaatattaaggattaggtgagcaaatgaggacacagagcaggacactgtacaggaaaatccctcaggaggcaaaccaagagcatgttctcctggaagccatgtgaggaaggcacatcatggaaggtggagtgatcgatcaactgtgtcacacgctgccgatggaccaagtaagaggaggtctgaggatcgaccatgagatttgaaaacagggagctcagtggcaaccttgagtccattttcagatgtgacagcaaaagaaaacttaaggaagaatctgaagagatggataggacattaacattgaaaactttcatgagttttttctttctacagaggggagcaaaaactgacacctgtccaaaaaaaagaggtatattttaaagaagtgaaatgacctaaaaatgaagaatgtgtttatgtgttgatgggaatgacccccagaagaggatgtgaaactgaacaaagccgtgtcttccatcctacattagagggtgtgggatctggtgctggctcactggaggacctggagcgggaccctggaagtgctcttctgaacagttttatttttctcagtgaaggaggaagtgaggccatcgggcaaatctgagaatgatggagggaatgtcagaggtggaggatgacagaaggtgtgaaatgaaaatgttcatcttgaggagtgagatggtgaatgaactagtgggaaagtatggtcttccagcagtacaagacccacttgaggttttcagtgattagtttaaactgagctaattcaatttatggtcagttaaatagatttagtacacatttttaagacattttataggtcatgcactgttcttggctctggagacataaaaatgactaggatgttgttcctctcctcaaagtcctgcagggagagagactgaaatatgaaaccaatagctataataaattgtaataattctataattgagttatacttattgtttggggaagtactgccaagtgttgttgccaaatatagtgacacagcaagatgatggtgtttttcacatcagaatcagaatgtggttctccatagtgacctcccatttcctcaataaacatttattaaatgttcagcactgtgtgctaggtgttagagctacaacggcaaataagatcatttttgcactcaaagagctcaccatcaaatacagtgatttccaaccttggcagcacacaagaatcacttgggcaattttaaaaatcctgatgcccaggccataccccaaactaataagtcacatttttttttaacattccccagtatttccaatgtacagtcaaggacgagaattgctgatctagggtgagagacagataagaaaacagaaaatggaaatataggtgtgataactgctatcagatagggaggcacaagctactaagggagccctattgaggggtcagtcctgaaggtagaggggccttgatgacttccacgaggaagagccccctgagctgagtgaagggtgactggggtcagcgtgggaagtagaggagggatggggattacagctgaaggagcaggagcggcagaggcctggggactgaaagagcgtgtcccactcagaaatctgtgattcagtagagttaagccagggccacaaagcaggaagaaagtggcaagagatgcccaacagccattaggcaggagccacactagaatgggcgaattcaaatttgtttccccactactgtcaaattcctattcaaatacgaccagagaaacgtatggatcatacaaaaccggttaccccaacttgcaccacatgagcgagcagcaccttgagagaacctcagtggagtcagaggttagaggagctcctttacagagctctaaaggctggagtgagccacaaggtggttttagggcagaagtttctgagcaggaactggtcagatcttgcaaaccattttaatcgctggaacagacggtggtcttttctttggaacatatgagtccatgagaaggtgttgttaagtcagtttttctcttgtcttatttggattataagggtctgaatgagctcctattaaaacattttgagtttacagtgtttgtgttgtgtgtcctggttccacagagtttatctgttgtgaatttcagcacagttttgcaagtcgtggtttccgtttcatttcttactgtattaagaaaatgtggtgtggtaaatagagcatcgagaggcagtagtctcccataaaatatggtgtccacaaatctgctgactcctgaaggtgacctaaaaatgaacattatctactaagcatgttcaacgcatccaggacaaaaaaatcttgaactgacctttttgaaaaagacattgcaagagaagtacattaattgagtatatcaaccactgagtatgaaaatccaaaatgttttaggcaaacaccattaaatttactatctaaatttctaatatgagggcaagcaaagtggctcatgcctataatcccagcattttgggaggctgtggctggcagatcacttgaggtcaggagttcaagaccagcctggccaacatggtgaaacctcatttctactaaaaatacaaaatttagtcgggcgtggtgccgcatgcctgtaatcccagctactcaggagactgaagcaggagaatcacttgaacccaggaagcaggggttacagtgagccaagaggtaccactgcactccagcctgggtgataaagcaagactttgtctcaaaaaataaataaataaataaataaatataaaatgaaaagcaaaatttctcatatgaatattccaaacatataggaaaatatgatgaataataaaaaagttgctagctaccaattttcctcatgttgtaatatttttgccaaatttatttcacacattattactagagaaacacaacattaatctaaactgaatccacttgtttattcttctctaaatccattttccctgctcctgtctcccctctccagaggtccccaaaattatgaagttatcagatttttcttctctagtacattcatatgtgtttaaataaactataatattgttctccatgattttgaactactataaatggtctcagtctggttagattcttcagttacttgccttgtttatgtaacttcatgtttctgagatttgatttattcctcttaaatagacagatagaccacccattcattttaatccaatttatgactattaccactgtttagctctccattattgcaagacctgtgggctgtctccacctgtaaaaacaatgctgcaataaacatgcatgtatgcagcttgtgcacatgtgagcgggaattactcagggtaggataaaagcaccttcaacatttctaaatattgccaaactgcttaataaaatggttttgccagtttaaaatctcactagactgcatgcgaataggcaattttctgggtatataatgatatcttattgttgttttaatttgtattttcctgattgctagtgtggttgaacatctttttatatatttattagccatttcattttcctcttagtgaattgcctagttttcctaccaagttcttttttcttgtttctcttattggttggttgggattttattctcttttttttcacattttcgatatgaattcttttttacatgcattgcagttgcaaattttttctcccagcctgtgtctcttgtttacactttatgatgtcttcttttttttgtagagaactatttttcttttaataaactaaaactttattttctttgatgagtttgtggatgtgtgtgtgcgtttgtgttggcataaaaaataatttcctacccgaaaaacataaaaatacctgcttatatttgtattctaataatggcaaagtgttgctgttggtatttagctttttaatctatctgcaattgatgtttgtgtgtgatgtgagacaggggccttgggagcatttgttgattacaggaatctgcaatgttgtttctttccttaatccagtttccatttggtgtggttctgtattcggacttttatcggcttctgttggttcatttgtctttctggggcccattccacactaccttaattcctgtagctctgaaatgcattttgctatctggtaggatgagtccccccatcctactcttcaagttcatcttaattattcgtgatactttgttcatcgctctaaaattaacttctagtaccacacaacattctcttgatattgtcactgaagttgtattaaataaaacttatagaatatttttgtatgaattgacatatttatgatgttgtgtttctctgcccatgaacatgttatatgctttcatttatctaggtttcactttttttggttttcaatagagttttgtaatttttgctggaaatctcttatacatgttttatacagtcggttattctcacaaactctatttttgttgttattatagtgtctcttttaattaatctttgtttttgtacagttcacattttaaaatttcattgatatttctatattcatcttatattcagcaacttttctaaactcacatattaattctaattaatcattagattcacttggatttcctacatagataatcatatcattaggcagtttgttgttttcttttctaatccttattatcttcatttctttgtcctgtctcactatgctgactctgacctccaactcactgctgaatgaagcagtgcaaataagcatccttgctttgtttctgactttaaagtgattgcctctaatattttgactattaaataggaaatttgccatatacttttggtgaatgccctttttgaagttaaggaatcccctttagattcatggttttctttgaatttccatcatgaatttatcatattttattaaatagttgttctgtattctttgaaataaaaaacagtgatttttttcctcaaagttgattacacatttaaggaattcagtgaataaatctactaattacatccagaacctggctcaaggagaatacctcagacaaaaataaatggaggttgggggagcttgtgtttgtattctggaatggggttggagaagagctcctgactgaaatggaaatctgttccttcaataccagcactctacattgttgcttctcagcgtatagtagagcagcagcagcagcctccacagggtgcccagaaatgcagagtctcaggccctcccccagccctactaaaccagaatctacatttaaccagagagccgggggaacaatatgcataagcaagtttgaaaagctggtttacattgtccttcaaataccagaggcgaatccattcacattatctagtatatctaattcatctctggaacgtaaaccaactttgcactcctgagataaaattcctgtcattaaaaaaaaaatacattcctggattttttttaaaatatcttttcttgctctctaaaaccactgtaatattttaaaaaaataaaagaaaaaagacaaaaatatacctttgaacttaatttgctaatgtttacccgaggatttttccttccctatacataagaatgacctctaatttgcctctctggtattatcctcttctggttttgaatcaaggcagttctagataaataagtgatctgtggagcatttcctgtttttatcctctccgaaacattccatttagcttttgagttatctgtatcttgtattattgttaggactcacctataaattcttctgtgtctaattatggttgttaagtttttaaacttctgataacattttgttttaaacatcacatgtataatttgattttccgtgctttaattatttctttatatattttcttgttttcaaatttactagcaagcgtcattcctgttaattaaaagactctgctgaatttattactatataccaatttgttgtatccctattattgcttgtttataccttttctgtcttttttccttaacctatgttaagagaggcataagagttttgttgttctcttcagagagctacttctcaactttgtgaattctcttggatttttattggttttctaagtcagtagtttcttctcgtatttcaaattattcctttgttttatatattctttgggtttactctgttgatcttttctaatgactttagtagatgatcagctcattaatttttaatctttgtattttaaaaaatctccccttaaatactatactgttttaactctatcatgaacagtttaacagttaatattttattaatatctctttccaaatattttaaaattattgtttgtattttagatatgttaaatttgagtatgaatgaaatttgaattttaaatataactattgtatatgttattacttgctctgtagtctaaatagtacatattccatgtgtacttggaaatgtatgtattatttatagaaatctgtagtttctataagcaccagcaagcgtacatttcagaaataaggagctgaggctgggctgaggaggcaggattagcagtgtctctcaggttgggagctgagccctaggctcaacaacagaaatgcagttatttgaggaaaaaaataaaaagagtgaggtagaaaatcaggaagggaggggcaaggcatgggaatagagctggagcaatcaggaactggactgtttagcaaaacctgcagtgagaaaggtctagggtcttgttaaggctctggcttaaaagctataaagtaggaacttgatcatgatgtggtagctaaggttcctgcttctgtgactgcagatttaatttcaaatctgtatctttcatttagttgtagggactatggttatcttttctataaagtaggaataataattatatcccccatattgaggaatatgtagaaattaaatattgaggatatcatggaaattaactagtaaagtggtaagtattaagtgattactcaatagcaaactcaatgaattccactcttattatatatttaaattattttaattacataagtttcaattcttattaaataaattaaatttaattcttattaaattctaataagaatacctgtaattgagaagaagtagaagggaaggaggaggggaaaagatggtaaagcagggaatgagatgagaggaggtacagaaatagaccattgtacatctgtgcaaggataggtcctgctttcgggacctgtaggctgtggccaacctgcaggaggaggcaggaagctgtggctcatttcaggcagagcaaatgtgtaggaatcccacagttccttcaggaatagaaacccagcaatattcttccctcttctccccacttgttctggaattacaatcaggtaaaaaatcagtccaggtttgatgaaccatttcttacctctagtattgattccctagtcatgcctcagagctcagcagtagggaaataccaaaaaaaaataaaaataaaataaaaacaataacaaattgcagatggatggggagctctgttcacgctctgtgactggggaggaagacatgcatataaggaagtcctgctgcttcagtaccatccctcaatatcatcctcaactgtcaatacttcaaatattttaactgtatttccatccagttgacgagatttaaaattattttgaacaatgtattctgtttgtatgtctcattgagaccatcctggaggctggctaccacacatgggaaatgtccattatgtatttgtaacattttaaccagtaagagaaacagttgttctctttattctttattttattcttttataatgacgtttgctgagtatcatgtagacgtggtgtatcactaaatggaattttattaaggggttctaaagttcagatataaagttggtatgaaagaaaagatatactgaatatatacttttttcttcctctaataaaaattccctctcctccatacaggtctaacttgtgtattttcccttggttacagctaaacaatctaacagctgtagatgaagacatgatacctgcagtagccataactctccagttggagtttccttgatttttcttattagatagttgatcccgttttcttctcatctgataaggttaaactgcagccatttggaatgcttttcatctacatgaaagtcgccttcctgatgatgtggtaatatcaatggtaatatagcattcagctgcctgccaggctatggggaaggtcacaatggatattattacagagaactcatccctcccatgaaacattcatgctttatagcagcctccacttcactgcttcttgaagaggtccacttccctttgacctttgatgatggcattaaagtgcatgctcatttcaaaaatactattaataactaccatttagatagtctttatgttttacaaagagctttcacatctgtcatcgcccttggttctcattccaactctaggctgcagatgtcagattggccccaaatcgcacacctaggaaatatcagagccagaactaaaacccaaaccttctcctccaagtccctgatcttttaattacatcatagtgcaagtggagtttcaacactgtttttctcacaaaccagggagtgttatttgagccagtagcatattatattacttgtcaatgtttccagaaaagggtatcgtaaataattctttgccaagtggatgacttttcttacaaaaacaattttgctgcttagaaaatttgttttctgaactataaaataggtgtataatcatttctcctaataatgacgtgaggctaaatgaactcattaccgttaggatttttaagcttccctattttggcttatcaatggcatgtttcaagcaaagctcagtactataagaatgaaggatttagaggaagatagtgacgtagatcctgctcccaggaaagactgtaatttgagcacttgttcctaatgtgttttgggtcaagtagaactatattaggccatttttgcattgctgtaaagaaatacctgagactgggtaatttataaagaaaagaggtttgattggctcatgattctgcaggctgtctaagcatggcacccgtgtctgcttggcttctgggttagcctcaaagagcttttactcatgacagaaggtgaagtgggagcagacacgacagtggtgaaggcaagagcgagagagagagagggggaagtgccacacacttttaaaggaccaggtctttgaaaaactcactatcacaaggacagcagcaagccatgagggatccgcccccatgatccacacacacccaaccaggccccatctccagcactggggattacaactcaatgtgagattcgagcagggccaaatatcccaactatatcaagaactctggaatcttttgaggacattgacccttcctggaaaagtctccactgacaaaaattattgtgcaacatttcagagccctttatgggttagctaatgttcatctctggttgccggttaagacctgagaatacatggacacaggaaggggaacatcacacaccggggactgttgtggggtggggggcggggggagggatagcattaggagatatacctaatgctaaatgacgagttaatgggtgcagcacaccaacatggcacatgtatacatatgtaacaaacctgcactttgtgtacatgtaccctaaaacttaaagtataataataataataataataataataataagacctcagatctagaggcacgtaatttgcactcaggttgctaagtgtaggttgcggtgaccatcaacagtaacctaatgcccagaattagctttaattgcttgctaatattagtgtagatgtaaacacttaattagtgtaaatacaaatcattccattgacaggtaaaatgcaccttaacttccacagttgcagctttgggtgtttgggttagcaaactgatgtaaagaattgccacacaattaataacaaacgaggatattcacttagggcattcattaggttaaatttgcatacttgaagctattagaagacattagcccattgtaaccaggagaaaaataaagctagcactatctctttgccttccccacttcacttggctccaagcttagccactctgatgatacagtgctaagaagtcacacttttctccttataaatgactcttggcccctgcagaatacacatgtctactagggagacacagagctgggaggctttcgggagactgggggtcgatttcctttccttaaaatgaaagtttgacttgtccttccaaaaataaggtctttgtcttccatttgcttaaagaaaactgagaaacaaaaaagggattagctgaatttcctttgggtaggtagcggctgctgatcagaagggtctaatgaggtgagcagcagcaatcaatgttcaaagggaggtgacgacaaggtcaccaggtcaggcggtgccatcggatttggctgcgattgtctcgtcgataaatgtcctggcaggaaattactataaacaaactgcagcatctttttaattcaggtgtgggctgaggcgagggcactgacccataggatttcttgaggagaagaagaggcagcaggttatttctcagatttctttcaacagacaaatctatggagctgagctgtgtgtacagagatgtcctgttttcccacctatcttgtctcgtctttgcagaacatcattcctaccactgccgtgttgatgctgctagtggctgagcttgggccctcctgagtgtccacaccaaagctgagttgagacttgctttagtccatggggaaccaaaatttgtcatggtcagctagctcttcatgtctaaaggagagtattatgagttcaggtcatatataattattggggtcaaatggatctaaataagttattaactaaaagtatgaagtatagtgggggttccagtatccaaaatctttggtatcatagagcagtagcatccttagaatcatagagctgttgaatactgggcaaggaaggaggcttgggagggtgtacagtccagcaccggcatttcaggtataaagctgaaactccaagtcattaaatgattccctgctcataagtcagccctcccgctaatagaaaaaaatattttaatatttttgttgtatggctaacattttcattcaccatggatttttatcccttaataaatctaaggcatgacatttcacattctggctggtctataacatcacatgccctggtgagaatggcgtgtgtgtgtgtgtgtgtgtgtgtgtgtgtgtgtgtggccaagtggaggtggactcaggggaagccttgccttgtctgcaaagcttctcctagccctttgcagagggcttggcatctttcttctgtgccactgatttttatacaaatgccattgcagcacctttgaggacattctgtcattctgtcctaccaggtagtgaactgcttgagggtaggaaccataaattagcaattaaaaataactgccaaatgatggaccaaagcatggcccatagattatctaacactttagtaaaataggaggcagagaaaatgacacaagatagagaagaaggagaaaaaagcaaggaggaggaaaaagttgtcattttcataaagagttctgaagaagcttttggtcactttgcatttaatcccctaaatcaatttgcctgcctggaacccgggtctggggtgcttgccatgttgaggatgagctggcttcatttccagctactggactcgcagatagaattgtccttgatgttccgaatagagagaaaggcagagactgacagagcgggagtgtggggaaggctcctgcagggacagagtgttctaacctgctgaggcggctcccatggagccatgagctgcgtgcaaatggcagtcagtgtgtgctttgaagcctccagccttgggaacttcaaacaaggggaggacagacagatgatctatgggaaattaacatctaaaaggtctaaaatctgttcttcctgtcaccttaatctcctgcctgctcactgacagtatttactttctgaacatagtgaacatttaatacaacagaggctcccacacacttaacttttctaaaacagaaaatcttacatttcaatacaatccattttaattattttatttcttcactgcattttgaactgttcctttctctaggttttagaagatttccttaaggagtagagtaaatgaactttgagagaagaggtaggctagcaggtggaatgtcctgccactgctctggcagctccatggtcacctggcagatgctcatggaatcatgtggagtaacagtgcctgctgggtcaggggcatgttttctgcctcttaccttttgatttattttgattcctggaatagatcagctcactttgaagtatacctaggaaggatatataatttgtctatacccacccaccgatggatttatccattcactcatccatccaactattcatctactcatccatccacccatctaaccacccattcatccactcatcaattcatcttctattcacccacccatccatccacccatccatctatccatccatccacccatccgtccatccatccatccacccacccatccatccatccatccacccacccatccatccatccacccacccattcatccactcatccatccacccatttattcacccacgcatccatccacctaccacccatccatttattctcccacgcacccatccacccatccatccatgcatccattcactcactatttgtgcattcaggaagagagtcaatctacaaacatctttagagtacctactgtatgcccagaactatactagatgctggcaataagagaagaataatttgtggctcttcctttaatgagaatatgttctacacagtctgagcaccataagcagactatttctttttttaaatttccaacttttaagttcatgggtacatatgcaggatgtgcaggtttgttacataggcaaacatgtgccatggtggtttgctgtgcagatcatcccatcacccaggtattaacccaagaatccattcgctattcttcctgatcctctccttcttcctccaccccaggcttggacaggcccagtgtgtgttgtttccccctgtgtgtcttatgttgtcataatctagctcccacttataagtgagagcatgcggtatttggttttatgttcctgcattagtttgctaacggcaatggcctccagctccgtccgtgtccctgcaaaagacatgatctcattcctttttgtgattgcatagtattccatggtataaatatactacgttttctttattcagtctatcattgatggatattaggttggttccatgtctttgctattgtgaatagtgctgcaataaacatacacttacatgtgtctttataagagaatgatttatattcctttaggtatatagccagtaatgggattgctggatcaagtgatatttctgcctctaggtctttgaggaatcaccagtctgtcttccacaatggctatactactctacactcccaccaacagtgtcaaagcattccttcttctccacaaccttgccagcatctgctgtttctttttgaatgagttatacactcctattttgaataacgacatatttatttttggcataattttctagaaagctagtaatacagattatacattagaaggtcctggagtagatgcatggttcatctgtagtagtttaggaaagcaagcccagacacattgcaacaattctacttactaccctcacaaagaaagcattggtatatttttacatctcataactgaagtcatcttagaataaggtgttttctagagtgttccatgggtaaaggccaagagggtttaatcctagatatgaagaggctctctgagctgtcttcatggtaatcgtggtcagataaggtacacagtgatttaaaaagacatacgagtttcttcctttagggagctaccagctgaatgaaaaggtacagcattaaacgacaccaaattgtttttaaaaaggaaaacttcttttgctcacaagcactgtatagacaataaagagatgtacaggatagctggggaattcgcatggtgtaaagtcaggtaaagtctttccgaggatgtgacatttcagttgaaatctgaaggaagagggaaaaccagcactgcaaaaagcagaaggaaatgtactctacaccaaggaagcatcaagtgctgagtcttgacatcagcatgagctcagtatgttggaaaatcaaacagaggtgaatgtgcttggagcccagtgtgggagggagagtagaggtaagttcgggagataggggaaaaattaggccacgataaggagtttggattttgttttaagagcaatgggaagactttgcaggttttgaaggagagtgaatatttaatttattgtacaaatgcagatacttttgaaattaaaaggggcactcttaatcattagacctggacacagggcataaactgggtgctgcaggtaacttgggatgtaggtttttcctggtttcaagtagtatggagacaaaacttctgtttctaaaagattgttcaaactgcttagcaaataatacataggagagtgagggtggaaatgcaggcaatatagaccaatgcaatgcacagatttgggaagggaggaatgaagatgcggatgtgtgggaccggtgctgatgggaacatctgggccctgtgtctgtgaggtgctgaaatgcagcagagtcccagtcctggacagggaacacaggtgatctggcaattctagatcatcagaatgaagaagcaccacttgcagcttagaaatagtaaatttagaacaatttaagcggaggactttttacccagcaggtagtacgtacaagaaacttgctactccaagacgtgattgagactcacaatctatcaaggttaaaagaaaacgaatggaatgagttgctaagggaaacttggttattttgggtatgtccataatgttttgatattaatttaaatgaaagtttaccacagcctctccataccacactcagaagcaatagaggactgaaaacctttgtggataactctgacaattttcacatcttaaattccccactctaccaacaagctcagatcttactcattccagcaaagaaaacaaaacagataacacacaaaaaaacaaagctttcttttgtttctgcctttccttaaactaccacatcattttcctttttcctgttattgccaaatctcttgaagtagctgtgtatgtacacttgatagccttcattttcttgccttctgttgctccttaaatcaatgccttttaactttcatcctaacaatgtgtttaaagaacagtcaaaattcttcagcacagtgaaaattccttaatatcaaatgcaattacattgctcttcggatccttctgtcttgtttgcagccctaggaggtctttaagctccctacacatcagagacccccacctccctgcatggattttgacttccttggggtaaggactgtgctggatcaatcctccatcctcaatagctagcttagtgtctgacacacgtcagatatttatgaaatattgtggacttggatttggtttaaaatggcctaccctgttctctgccagatccccacgcctgaagatggtgagtgtccaataaatgtttgttgaatacatgaaagaagaaactcctggactgattagacagtcgctgcgtatttattgatcccttctagggcacaatactgtgtttggagcactggtacttgctggggtgaataaagtgagaatcttacagccacggtcttagtttcctcatcatcctttctttcactctttagcagcttacaatgctaattttttccacatctcactgctactgcagaaactccatctctaagagtatggaaatgtccttaaaaacatcatatataatgactttttcttagaccccaggaaaattatatattgcataattttataattaagagacagagatcatctaatctaagagtctccaaatttttcaacgaataatactcatttcttaatccccgtaacaccattttcaagaatatctcaccaaaattatattcagcaacaatttattttctccttcaaataaaggcatatacatatctgtcctcaaagccactgaccagcattcattcacaactgaatatttattgagttattatgaccccagtgctgtgctggatgccaaaaattaaatgatgaacaaagcagattcctttcttgatcttacgatctagttaatgggaaaaatccaagcttcccatactagtttatgtaataccagccaaaagaaaagaaatgtcttatttagattcaagcgccctttgaagatgtatgtattcttttatgcatgtgtttgaaaattttaaaatatgcctgactaccttggaggctgtactatactgtgggaatgtccagatgtgaagccattcacctggtctaatagcccattttacaggcaaggacgttaaggcccatccagaaagctttatcatagcttgctaaggatcacacatctaagcaatgataaaactggggctggcagccaggtatacatttgcaatcctgtactttttccttttttctcctttgataaaaaagcccttgatcctttttttacctttttatataatcttaaagtatctaagaagtttgttagccctagaacctgtttaacttggtttaatccagcattttccaaatgtaacttacccactatcctctaatgtcactgggcagttgtcaccatctcctgggacacaggccttccacagaacagacacaggtcaacactgacccagatagtgaagttctaactcctttacttgtcgttgaagtctcctaaccccaatgttgccatctctgtcttccatgactctatgcatcctcttctaaaattatactatacccctgagctatttgattcccttccccgaatatgccttgccttccatggctgtgtcctttctcacatcatgtcttggcctgctgcagcgtccccttcctatcagcccatctcagttccagacatctctccagcttcccattcagtggccctcaatgagtccagctggaaatcatcatttctcctctccctcccatagtactcactggctgtacctttcatctggcagtgaaaatgcattactccttgctgctagttctctttgcgtgttcacacgtcttttcctggggataggaaccttgtctttttctttgtaactcccacaggacaagcagtcaggaaaaacgagaaatttgaaagctagtcaggatttctccttctccctcaccctcactaaatgacaccgcagatttgtacatctttcctatctccattgctaaagccttaatcctggcctattatttcttgtttagtctatgttattgtctcctaacttgtctccttatctcctggctcacccacctccaatcatcctccctgcaccctcctgctagatgacctttctaaactagaaatctgatcaagttattccaatgacatctcatcatttgcaggattgagcttcgtctccttcaggtaacataaaagaccctttattgtctggttcctgacagctctccccctttctctgtctcccccaatttccttcatacccctctctctgcctactccatctcttccagcctccgccccgcccatgcctcacccttcctttccagtctacattttatcatactgagctcttatgaggttctggaatacataagttgttttgtgatttctgtacatgctattgtgtttgcttgaaatgctaacccttgccttcctacacactctcttttcttcatgctatactttttcatttcttttcattggctctgcttctgttagttactttgcggaagcttctatgaataggccaggatgagcaagttgattctctccctctctccctctctctttccatttctccttacccgcccccacccatgcacatattattagacacattgctttgcaattattgaaatatttatctgtttccccagttgggctaagagcagaggggaatgctgtttggacaatccttgtatctccgtcttctactaaagaatctggccaatgtgaggagctcagtattttttgagtaaatcaacacatgtataaattgtcaccattcgtagaacccaggaggttttccgcacgctggtgggctaagtgaatataaaatcggatggtaagttaagtgagaagagccctgcaaatgaggcaatagcagccgcaggtgctttgttctcacctaagcggacaccgagctcactggctttgctgaagcagctctgcagcacgttgagccgcagcagctggaattgctctcgtctgaatcctcccttctggaatagggaacgagggagtgaaagactagcacataatctgtggggcttaatctttctttgcaaatccccaaatactgtgaaattggcaataatccaggcaactccaaacttctgctcaccaaatagtccccaccctgcttctacagagggcagctcaggtgttttaaatgcggaagtagctagtagagagcaacttcactcctgtaacctaattcattctcagcctggaaaatggaacgtaaacatcacaacctcagccagtcagagttttgccgcacttcagctcctaggaaatcatttcaattcctcaaagtctattttccccttcaacatccatccatccatccatccgtccatccatgtgtgcatccgtctgtccgtctgtccgtccattcatccgagagacacatcgggtgtcttcctggtgccaggtatgtttcagagaatatggttatgtttatagagttcacaatttagtaaatattttgtgtcatctaagagtgctctaaaaatctataatcctgaccagtagaaaaaataaaacttttgaaaattaaggtttcaagaaagctcttatttcttaaaactgtatagaggactgaaaatctggagctaataaagaccttggtacggttgactttcccgtatgtgctactgggaatccaggtgtctcaagggacaattaagagtatgactgcctcttgtccctttcgagtagtcctttgagggttgttttatctttctcccattttaaccatattttacaagtctaacaagacttgagagggtgatgctctgagacttcacttgtgttcttgagacacatactcgagtgggatcttggttccattactttccagttctgtgacttggctactttctataaccgctctttcccttggtttcctcatctggaaaataggaataataataacactcattctctagtgcatcccatggtgaatgctagctgaaatcaacatatgtaaaaggctttgcaaatgcctggtttaacggaagtgctctacaaacagtattgaagaggatgatgtcgattatgatagtaaaaatagattctgagacactttgtatttccattttagaagtgcctccccttttttttttctccttttctctttctgagactattaaaggttgttcttatcagtaagggcagcttttccccttttctcacttcctccccactccccctttgtctggaggttccttggcagaaaggaacatgtgtttcttatatgtgagtaactctgatatctattagagtctgctgagtgcagagagcttagtcactcctgggggatgatgcgtctatatcgggcctcagctcctatctacagcctccgtcaatgtcaaaaagatttcagggcaggtgtgaggtttagaattgagggaaggacaagagctagtgagacagccttcactgagagagggactgacggggcccccatgaccatctcgtgtttggagggtctctggaagggctcctgagactcagcacacagtgctgctcatggctgggctttattcctgtgccatggtgaggacacagggctggatcataaggggtcaaggcacaggcagagtctgaaggaacccatgtgagactttcttatgctctttccgtcccaagagggtcccacagagcccactgtccctccacaaaaatgcagcaaaacatgtgggatgtttctgcccagggaagcccagtagagactcagagtctaaggtcttaactggacgctggtcatatcgtcaccctctccctagcacttactaacataccagattcccagaaggaaaatacgtattcagcataaaccacattgcttgcacggataatctaggcacaaggagccacgcttactagttaacgaacagtggaaaccttcctgaaatccaagttttctggtgccagccaaggaccaaccatgcaagcaggcctttctaagggcagcaggtcccaggaagtacactttcaccaccccctgaattcttagctacatttccttggtagaggtgatggtggggctacatcatctttctgatttgcacaaccttcatggacacacgtttatctccctgtctcttgctggctacatacttatgaaaaaggcctggctgccagaggcatgataatgccaaagacactgatgtccacaactgggcacctccttgtgagctggcatcacttagaatcgagcctgatttgccaggggcttttgcaccctgtcggttggcctccacttcccttagggtgtaatcttagtcccctaggatttcttcagccctacccctggctttctggctttcccatgggtatcctgttactgagagctgagcatgaaggggacagtggagtcagaaaaaatatccctgtcagctgccaaaagaagacatcattttccattgcatgtgagctctattatgaagagctaggaagggcctacacatcaacaccaaaatattaataaaaagaaggctgtacggtcctatccccaagtgctaaaaagactttagaccaatgtgacctgtggtataattgcacaatttcaagcagcctttctaaattaaaacgtaatcccccagcagtgaggggcttgggtggcccctccccctccctgggattcatttctctcttccaggcccatctctttcctgccgtaaatctctttccttctgtctctctgtctgttcatccttctatgtcctctatctagcttttcctttcttgataaaaattaaggaaaaacaacttgatagattttccgataaccttctagaaagtctcaccgggttacattttgctttaatagcatttaagccaatctgcctgatgttgctgtaaaggtcaattaaattcaccctaaaaatttcactcctggctcattatacaattggaaaatgaattagaagcacatgctgcccctgaggtttctgatatttcactaatgaatatgtcttaaaatgcaaaaagaaaaaaaaagagagagagaaaagaaaaaaaggtgttgtaggccacacagcagcttgcagtgctaccagctggtgcagaacattgtcataggcagtggtctgagactagtgaacactaggtaggcctgtctccactccacattcagaggtgttcacaggtcccaaatgcacgtgggtctggtcagctcttcaccactcctctgcacatccagagcccactgttaaaccccaggggaggcatccagctcacctgactcttcgttggctgctcttagtgcggtctcaaggaccacagttcagtttaatatcagcctgagcaaaatgtgattctgaaggtaaatctacaaggatctttgtgggcagagcacgtgtgttgcaaagccaggtctcagttgatctggggattctcagactgtctgagaattttagcattgtaactgtctgaggagagaacagccctgtggaggagggaacatgtatttctgggtcactctgagggcacaactggggccaagagtacagagaacacaaagtcaagtttgagcccgacttaaagaagtaattttaactgactttctccccaactcctgacaaaagaaagccatcagacaagatagcaacttcctggtccctgaggaaggcttcaacagaactgagcaaccctatcccaggagtccatgtttcaggtggaagtctccttaattcattcactcatttcttcattctgcatatttattgctgtgtcctagacagtactaatcttgagaatgaacacaattgcctagttgttatgtatgaatcgagggttgttttttatttttgtttgatggtaaggttatattttaaaagaatataccatatctaagtccctagtttcaaaaactgtcctaaaattcagatttttgctcacattggagttgtaaaggactttcatgttcctcttatagcaaaggctgtgacttttctgctttcatgaaactgcaaactggtatttattttaggacaagatggctccaaacctcgaaatatgagttattggatgtctgtcttcaggtttaagtataaacctagctgaattgactaaaacatatagagacaatctctcaagcctttcagagcggagagaggaagtctggttgctatcctccatgcctcacagatgttcctataggattttaggattccagactagaagtgacattgaggtcatctcactgaagcttatcctgtctaaaacgaggaagctgaggaggcttcccttgggtagtacaagaacaagacattcttcagccagggtctctagactcaagagcagtgttctttcatggtaccatattgacttcctccatttgcaaaattgtgctactcacatgtatggtgttttggaaggtggaaccaaaatttctaggaagagtgagattgcaaaccatcatcatgtgtgttgagagtggccaatcaggcagtgaagaaagggggaactggtgaagccctgggcatttcacctcagggctgctgtctctggcaccctgatggtgctcctcaaagcctgcttctgaaagatttcatccaggtgttgttgatgtttcccattccatttcctggtgtctccatgtcctttttctttattgcaaacctggtgtcagcagatgttcttggggtcctcctgactccactgtgcagcaggctgagtgcagtcagactgtcattgagaagtactgtaacctgggtccaggaagcgatgctccaagtcactcagccactcctcagcatcactgacactcagcattctaaccttggaactgcagaaatatagtcgaatgcaaaggccatgagctagagattcatgtttgaatgaggaaggggatttccctttccttctttctaaactgaacctgcaaaccataacatggaaagctgaatactgtcctgtctgacgtccacaagagcgggatatggagaaacatgagcacagactcaggtccctccctcctcccatctgccttctcttccctaaaaatcttccacaggttcaggatgtcctgctgccaatcaaacatgagctcccatgccacatggctggggaggaccagccagcgcttgtaggcctggcaaaattgaggatgcattttgatttactcacatttaaatatcagagctagttttgatgacatactatgtaactgaacataatcaagtttcagataaaccagagcaggccccaaaagtgcacctgatgaatttccttgtagaaatggagtgttggcagaataagaaatggaatgcatggagtgcccagcataagaagtcgggggtcagggaggaaaggagggaaggaaggaagagaagtgagaggcagggagttagatcagtcaatcacacaattaccctgaagacaagaaatagaaggactatctaatttaggatgttatatatcctcttgaaatgtaaagatttagacaagaaaaggggcaggggagaaaagcaatccaacgaaagacgaaacaaatccatcagggcaggatccatcaggaaggaaagagtgtggagcgactcctttgcttaatgcgggcttctggtcagtccctggagcttgtcatgtgacagcaggattctcctgctgctggagagcctaataggcaggattggtccaggaactcctcccgctggactgactggtttcaattaagactatcacaaaggctaattatcattttaaacctgactctcaggctcactctccctcttgctgtaaatggattgcttaatggtcccagtgcaaggctctgaaaccctggaggtttcctattatttctttgcctccagcagggaccagggacttctagagtgttaggtttcaagggagaataagagtagcaataccctctttctttttcacagaaacaaagactgttagcattgagggaatgttcgattttggttttgatatagtcggaccttctactgcatgaaagagtttccctatgtgccacctctgaccaggatttcctggcattgtttgaacacaactggtgagagggagcttgttacctcctggtccattttggacagttctcatattcagaatgtctctcctaatgttgagctgatatctgccctttttaatgtccatgattctttcccagttctgccctgtaatgtttctgggcttagacaactgacagtcgactgagccagcagggcctgagcttgggaaagaggaaagcttggcaacctctcccgcaccggcccagtgggtctcccacctccagcaccattctgtgtgggtgttccatgttctggaacctgcctcaagttgcccagtctttgttagatgagcacatgcttcattttctgggctgtatcatgcgctctaccctgagacaatgtacaagtccccaaaggcaggtattagtatccccatttacagataagaatgctgaggcttagaaagatcgagtagcctacccctgatcacatggctgacaaatggcaaaagccaacactcaagccccttctgttggatcccaaagcctgttttactatgtcacaccaagacaaaattcagagtatacagtttgccaggtaacaatgtgcttgtgagcataatataaatcaatgtgtgaagttgggagtgtccagaagacccctgaatgtgttgtatttatatgaactatgtgattggttaccaccggagctattccaaaggcaatcactgtattgtgctcacccagcctaacaattcccttgtgctctgcacttgatagctggtttaaaaatcaaaacccaaaacaagcaaacagaacaatgctagcagattcttagtacagttgcatgcacgtgcttagcctggcctagtggggcaggctccctgccctcacaccctgctcaaccctcttatgctcacaggtgcacacacacaggtacacactacacacacactcacatacacaccaaaaacacagacaccccacacactgacacaccccacctgctctcacacgttgcacacacacaagctacacacacatgctacatacacacatgctacacacacacctcccacactcacacatgctacatacacacatgctacacacacacctcccacactcacacatgctacatacacacatgctacacacacacctcccacattcacacatgctacatacacacatgctacacacacacctcccacactcacacatgctacatacacacatgctacacatacacctcccacacactctcacacatgctacatacacacatgccacactctcacacatgctacatacacacatgctacacacacactacacacacaccccacacactctcacacatgctacatgcacacacacacacatgctgcacacacatgcctcacatacacatgcatgccgcacacacacggtgcacacacacagcacacacaccacatgctgttcacaccctcatgctgcacacacacatgcatgcgttggcaggtgcttccttttcacccttctttttccattcagccttgtcccaaatttacatgggaataaataaaaaacaaagcaaagattgcctgtgggggtggggctgtccccctcaatggcatctgcaggttgctggctgtgttttgcagcccgaggcctatttctcagtcccagctccttggggccagaagcctggaacaaacccaagggcaggccttaggcacggggacctgccctgactcctccgtagggccaggttggccatgccttcagagctccaaatcccaaaggaatgagtatgcaaaactaagacccacctcacattaatttagtgggtgaactgtgtgtctccccctcccctgcaaatctatatggactaaaaatacctgcgccctccatggcgcccaagactgctgacaaaggaatttgcatttgcagtcagaaacaccctcggattatttttgaaatcacctcccttacattttaaacaggttggtggattcatcatttaggctgccaccaggaggcagctattaagagatgtgactgggaatggcatttttcttaaaaaaaagtggcgatttcactacaatgtcgtgattttttttggcttaaaaataaaatctgtttgaacctaggattctttagacaaactgatatcttcagggaaagtagattaataggaaatgtttttggaggaaccaggtgtcttcccagttcccgtggaatgacagcaaggacagtgcgcggcagccaagatggagaacagggaggaggtgggggaagggggcactccctttccttctgggcctcttggactaggggaggggaggacagggtgcaatcgcaggatcaattagcagcccaaaagtaaattagccaggaaattagcttttcaggtgtccaactgtgtgtcttctcaaagactgcagtcctacccatctgctatttacgctttgtgcagggctcgggaaagaatgtggtcccacttacacatccagcctgccagagagcaggtctcagggatgcctaaacgcagtggggaagttggaaggatccgcaaaggctggagtggagaggttgcagcaaggaggaaaacgctgtgtgcgtgcggatggagaggtctgcctgtatgtttgtctgtgtgtctgggggtgtgtgtgtgaccgtgtgtgtctgtatgtgtgtttacgtctgtgtgtatcagtgtgaataaccatatgtgtatgtgtgtgtgtgtctgtgtgtgtctgagtgtgtgtctacctgtttatctgtgagcgtgtgtacacgtgtgtattgtgtaagtgtatctgtgtgtgtgcgtgtttgggtgtctgtgtgtgtctgcctgtgtgtatgtgtgtgtacacatacctgtgtgtgtatgtatgcatgtgtgtgtctgtgtttatgtctgtgtatctgtatgtataaccatgtgtgcatttcttcatatgtatgtctgtgtgtctgtaggagtctaggtctgggtgtctgtgtgtgtaaatgtgtctgtgtgtatgtatatgcctgtgtgtatgatgcgggcatgagatttgcagagagggtgttggggcacaaaatgaggacttggtttacacacaagcacaggccacggaaccccaccaccagcagatggagctgaaggtacagttttgcgggaggccaggctgaactgccagctgttttggtttgctggagacctcagaaagaatgaccatgttgagtggaagagctatctgcatggagagagaggaaaccccaaacacaccctggagtcttgcttcttcactacgaagccagtattgttttgacttgctgattgaattgcaggtggaaactaaatacatcgtaccttgctttatttcagtgtgtgattgggagataagggtccccctgtagccagtttagaattagaattttaaagtctggataaaccttaaagaatccaaggcatccttttgctttacagatgagaaaaaaaggagctgaattctctggcgtttttgtttcctcgccctcactctgtccaagccccgcagccacccacccttttttgtcccagtctttcgtatcaaaacctccctcctacctctttttccttcctgtccagtacagtctttgatcacctcccacctgagctcattcaatggtctcctaactggcctccctgcctgtgggctttccgcactccggccctctccacaccaccacaaggttaaccttccagcccagctctgattgtgtcgggctctgtgcagacccttcagtgggccgccactgccagcagctgcagaatcaaacccggctgtagcctggctccaatctggaaatgacacacctttccagcctcacactgggtcacctcttttgccctccctcttcgagagccaaactgagtttcttgcgatgtccgtgcacaccctgagctctgtgtcactctacctttgttattgttttctttttcaatttgtcctcgtcgtattttatttccaaatgactcctcaaatctccccttcacatgctaccttccctataaggctgtcctgatgacatcagcaagaaagatctatttcctgctctgatctctccaggcacttcctcttgacccctctgctgtaacctgggcctttcactgtgattatctgtattcacatcccatccctctgtcttgaagagactcaccactttgttttcccactactgttgcatataggaactcaataaagttttgtgggcaaatgaatacaagtatttgaccttacatacatttttcccagctcagcctgcatttgacgtggtttatggtggtttcctcagctcagtctttcccactgacagacagcatgaccacgtgcaatcaccccccagccccccgcaatgtgccttcagtatcctcaactctcaattgagaacatgagtaaaaattagtagatttcactttttttaatgtgtgtgctatcccctagcgtcaggcaagtttatctcccgggccctctcccttccttgatgactggaagagggaacaggcgcaaactcatagctgcttctccccgcctacgcgctatgacttgttggaaaaccattgtttcagaggaggagtcctttccggccctgccagtcattgtgtgatttacaacaactccttctacctttcgtagcttgaagacttccccactctccttcggggtagatgtggaagcaatataagagtgaagaagttctactgtctccggcatctgttaacatttcactggcttcccgagaaattggctcatcctgtccttgctcatcttttgtcccaagtaaaatttaaaattatttcagatggcttagtcgatgccagcttgtagccttccaactgctatttctaaaaatttatgctctcattttattttattcttaggaggatgatagacttttagaaacagaaggaaacttcagtgataattcagaaaatttaatttaattgtagatctcaggcccaggtgccactgtcccatgctttcttccttgtcccttgtccttcctcatctaagatagctcctggaattcccattgaaatggaagcaaatcttaaggttagagcctggcccatccagctctgaacagttactgctctgtgagcacggctctcactcacctttcctatgccttaaggacttcactgttggtacagctttaagtcagccgatatttactgatcacagaccatgtgctatgcaaaagtcatcttatttcattcacacctcagctgtacagagcagacgctaattttacaagatggaaaacagacacaggaagtttaagtaacttgatgaatggccctcaccttcaggaggtgaagctgggatagaagcctgggaattctggctcgagtctttgcttttatcgagtccattttcatgcactcttgtgaaggcaaaagcttaggggaaggaaaaatagttccatgctgaagtcacagtagaaagaaagtggatgggctttggatttagagacagctgaaatgaatcctggttttaccatttacttacatgatcttgggaaagctactttaattttcagagcagtggtttctttattaacaaaatgggataataatactattgcaaatgaaatagcacactaactgaagttgtatgtgtgcaatgcctagcaatggctcctggttgaatattgggtgctctctgaatgatggtctctttcctctgagtagaaagcttggcagcccttgtcccgcctgatgggtgccccagcctggtcatatgtctggagcttagcctagcctaaggttggattccaggctgtgagccagcgagggccctcctctttaagcagtgcccctttgtagctctgagcagcttctctcacccctccctaccttttctgaggttcaaggaattctattcccttgaatcttaagggggagaaagtgctgataaaaagacaacaacttgcaaaatttagaagccaattctcagagagaaaatgattgaaataaaacccttttagcacaggacacagcatttctcaatcagaaatgagcctaagaaataacccacatgtactacccaatacttaattttcaaaaaaagcttatcttcggtctccccacctcccctaaaatgcaacatatttgagatgaagactcaaatgcgtcttttaaaaaatagtcctatttcagacctgctatagtaggtgtagcagaaagaaggtggtaagattgggtctatttaaggacctgacctaacctaaatacagaatctacaagctgccatacagaaggaacaaatgtgagaaagctcatctgaaagcaccattacatttttatgagactgtagctgaatctattgtgagtttattatctgttgctgcacatgcaaaacactaccaagaaagagtttgtgtgatcatgtgagtgggtatgcttgtgttttaatcagggagaacatgaaaaccaacatacgttgtccctctgagtcttggcagctcagagttaaatttagtgctcagtggtgctcagtcgcccagcccaggtggtgctggatacatttctttccttgttcattttaactttgtgttcctattttcatttgtagctattctgcttcatatatattttaacatcacaagctgtctcagaccctttttccaagtaggtggaatataaatcatgagtaaataaataaagctactgaggcaatgagtgacttctgaggaagtggaggtatcacaggcaggcagacacagcatgactgaatgttattatagtgtggtttatactatgatgatacaactatagctattagcgatcaaacattgtttatgcattgttgcctcttctatgtttattaattgatttctataagcttacacaaatagtttatcaatatgaatactttgcatttatgggcttgttctctccctgttaatccaaggagatgcatggagagaggattgcacctgttagctgctcctctctccctcccctctagagactcatcatgctttgtggctcctgtaggccaccctgccctgggctccctggggaagtctttcttccttttctttctgcatttgccactgttggtcccctaggtctttcctttgtcatcaggtactgtgtcttctcttccttgtttccctgcagctcctgcagtttctccctatgaagaataaagagcttcagccaatttcagtcctaaaatttggaggaatgtgtcagtatcttcaagggatttccaagctcttcctgaagacatgctgtgtacacatgtcttcatgtacactcccttgccacattcaggagtttcatttattctttcatgctactggattgtgtgtcagtgcctctaagacatcttattaccaaatcattctccactgggtacaattccaccaaattccagccaccctcaatcaagagtaaagcagggtcacgcagatctggcacaaactattcacaaacaggtgaggaaacagaactcaggagcttgggccagcctttaattaaccttgagaaagtcctccctggagttttactatggctcagcagcaactggcttttgggtgggaagtggcagaatggttatgcacaaggagaaatagatattgacatactgaggaatacttagattcgtcgatttctcagtgtccttcgttcttgttgtttcatttgtcttgattccccaaaagggccagtggctgcctcacatattggcttgttcagccaggatctatgatcatgttttccacttcacaaaagccatcctgctcacattaccaaacagttacctatcattttctggctctctgtcaaattttggtaaattttgcagaagcccaaaggagttggtatatctctctgcatgtgtgcatgtatagttgaaagaatatgaatggtgtatttatgagtataaaatggaattgtagtattttaagagcccgtctaatttggtgattcatatttttatatcatttgatagtggctagattgaaagctggtaccattaagattttgttaaagaattatagtatcatactgtggggtaattagaccagatttataggggacaatgttgacacttaaaaccagcaagagaatgatttataatcctttatgcatatacccagtaatgagattgctgggtcaaatggtatttctgcttctagatccttgaggaatcactacactgtcttccacaatggttgaactcatttacactcccaccaacaatgtaaaaacgttcctatttctccacatcctctccagcacctgttgtgtcctgactttttaatgatcgccattctgaccggtgtgagacacatgcacatgtatgtttattgcagcaccatttacaatagcaaagacttggaaccaacccaaatgcccatcaatgatagactggataaagaaaatgtggcacatatacaccatggaatactatgcagccataaaaataatgagttcatgtccttttcaggaacatggatgaagctggaaaccatcattctcagcaaactaacacaggaacagaaaaccaaacaccgcatgttctcactcataagtgggagctgaacaatgagaacacatggacacagggtagggaacatcacacaccggggcctgttgggggatggggggcaaggggagatacagcgttaggagaaatacctaatgcatgtggggcttaaaacctagatgatgggttgatgggtgcagcaaatcaccagggcacatgtacagctatgtagcaaacctgcacgttctgcacatgtatcccagaacttaaagtgtgtgtgtgtgtgtgtatatatatacatatatatataccgtatatatatacatatatatataccgtatatatatacatatatatataccgtatatatatacatatatatatacacatatatatatacacacatatatatacacatatatatatacacacatatatatacacacatatatatatatacacacacacacttttaatgtatatatatcagctgatacatatatatcagaatggcgatcattaaaaagtcaggaaacaacaggtgctatctctccccttgcccccatcccccaacaggccccagtgtgtgatattccccaccctgtgtccatgtgttctcattgttcagctcccacttatgagtgagaacatgcagtgtttggttttctgctcctgtgttagtttgctgagaatgatggtttccagcttttatatatatattatatattatatattatatatattatatttacatataatatatttatataatataatataatatatatatatatatatatatatatatatatatatatcagcaacagggtgttagtcccaagccttgatggttgcttcaatgtgaaaagaaaataaaaataaaggccttcttggtctcacctgggctcccacagttcaaggtctggaaagaggtaggttggggaaaatgtggcccatcacctctcctgcacacaaatgggatgagtcattttgactgacagtccagcaagatgtggaacaagagctataaatctagggcatgtggcatgctgtgttttatcatgcttgtcatcctggttttaagtcatttctttgaagaggaattgtgttcatcatgatggctaatttttttcaattgtttttaaaaacaaaaaaaccaagcagcagcaacaacaaaataacagttaagacattctccactaaagaaatattgttgcacaccgtatgaaacacattttaaacccagagtttatatttcaattgactaagtttcttaattgtaacattcaaatcttacaggccccagttttgagggtggtagttaaacctttactattttactatttcttgtgcattctcagccaaggactagcaattagtttaataaaaaatttgtcttttgcgtagatctatctctattccttctaaaactgcctaaattgttctctaaactagttcatctaaatgtaaggaataattaggatcattttgatttggttaatccaaagattaatcagggctgtattattgccaaaggtcttattccagcccaggaaaaggatcataataccaattctcaacccttatcagttggattttctgtacgagggataggtctgcagtaatgagaaacttagttgtgatttgtaattgaagagagtttttctattaactaactatgtaaagaacaaactcaggaaggcgagggctgaggtccccttcttggtgcctatttgtatgacggggcctgatggggcagcagccggccaaaggcaagaatagagacttaagctgagacagaactggggccttgtcctggattctccacttgttcactgcgccttggaaaagctacttaaaccccatgagccttatttcatcacatatagaatgggtttaatactttctccttaaaatgtttcccctcactgtctatccttcctcacttaatcaaaaaattctggtttattggttttatacattgggcttcctggaaacattttacgtagagaaagtttccctacactttaaaagaaaaaaagagattgaacatcactgcttataatatttggtgagttccttgaaggcaggatctgtgaattgtttacacctctgtcttgacagcctggttgaggacctggtatttaatatggtaggctctgaatttttggaatgttgaatgaatcagtgaatgagtggatgaatctataataatgcagaaaatttatgttttcatgtccttcagccaagcactgttgtgcactgtggtgctgttatattagacgaagaatagaaagttaaaaagaaaaaagaaagctatacccaaggaaatcagagacgccttttgtagcattgtgaaatgtcatggattttaagtcacaagaaagcaaaaggatccttcaacagtttctgtacacagccttgcacaatgaatcgcataagaaaggcttttggtaatgacgacattgaaaatgatgatgagtctcccttctgtgggcttcatggacactgtcctggagctggaagtggccagctggcagggaaagagctctttcccactcatgtctttgtcctttgtttattctcgattactccctttagtggaaggctttccaagaactgtttttcagttcctggaggctgcagcagtggcatcctgaagggtgagtggtggcagaggcagcgaggagcctcccaggctgaggaggggcccagtgcaagggagagtcgggcccaggagtgacactcaacaattttgttttgaacttctctgttatttccagcaaagcgatttccgtgacattttcttgtggcatttgaagggggataaagtagatttttttttctttatcatatttttttccttttctccctctccaaagcgatttatctggtctttctccaagagtcagcactccgcagaggctaatcaacagtgtgcatgttgcagaaggaggcatatgtgtgcttctccagctgtgtgggtgcctgtgtacacacacttgtgtgcgtgcagtgaggcagcagctgtgggcacatcaggagaaatcctgtcacataaagcttgtgatgaagatgccagtgataaacaagctgccggaggcccactgggtctcctccactcatctcccaccacattcagactctctggctagtggattatccataaccaatctttaatccctggcttggtctcaggtgcctggtcctattactctcctgatgtgtgatcatgaaaagaccaattaattttaatcttagcccaagcaaaatataattagacaaatctgctagaagaatatcatatgaggcatttcaaagccaaaagcaggtcaaattctgccattggaaggccagaagacaacgttttgttttctctttgtgcagtagaaccaccattgaagagatatcacttatgctactctccacagcaaccagagctgagagaggccaggttatatgagtgagacaacctcatttttttctgtctgtgaataaaaataacaatggctatgctagaaccgtagtgcaaaatgtaatgaaataacacctgtaaactgtaaagtactatatgaggagaaggcatagttttatgaacacaaagcataacttttttttttttttttgagacagagtctcactctgtcacccaggctggagagcagtggtgccatcttggctcactgcaacctctgcctcctgtgttcaagcaattcttgtgccacagcctcccaagtaactgggattacaggcatgagccaccgtatccaagtaatttttgtgtttttagtagagatggggtttctccatgctgtccaggctggtcttgaactccctgcctcaagtgatccacccacctcggcctcccaaagtgctgggattgcaggcgtgaggcactgcgccaggccccaaggcatactttttactgaatgaacacttgctgtgctgggattgtgcccagctccctgatctgcagcagccactctttgggacagttcatctcctccctcctgttaaggatctgcattgttcagtgccacctgccaggacctatggagtctccccacgttggcttttctcgcctggcctcttgtttaagttggttttgggatttgaaggagtaggctatcttcaagagtgtgtccaccaggaacctggccagaattcctgacttcaaaagaattcttaggaagagtctcacatgacaatgaatgcactcacagagccgcagaaacccagcaattcattcttcctggccctgagagggcccttttgtatctcccccacccctattccacccaggatgcagcagtcacaaagcaatcatgaaatatacccatctcgggcaggcttaaatctctgttgggtctccatttttctttctttaaacacttatggaataaatggaatttataatcagaaaccataaaatgtctgatttattactcatcttgatgacaatatttaataactcgtatatgtttcattgcatctttctactgccctgttgtggaattttactttaagggagcccgccctctacgtctgataccacaggagaagagtctcctttggagtcaggggctcagagttgctgtgagggtgctcagctccctccaggtggggtgggaatctcagcttctcagggcagggctggcctcgtcccactggacggtgttctcacgacacctgcgatgggggtatgccagggctttgtcactgacttccatgctggaaattccatatttgtagatgaattcctttggtccttgaaagcattttcttttcatgtgttctttgttaccattctgctgttctcgggaggaaaacgtgtcctcattgagtttggggattctgtaataaagagacatcctgtgagaagggggttgtgcctagagttggggacaggaagaaagctcgggagggaagaaaccgaagtgggattcaaagcgaggccagcatgcttgatcattttgcttggaaggatggacttaccctgttaagctcctgatcttttctttaataaaaaatatgtcttggcctggcatggtggctggcgcctgtaatcccagcactttgggaggctgaggcagatggatcacctgaggtcaggagttcgagaccagcctggccaacatggtgaaacaccgtctgtatttactaaaactacaaaaatttgctaggcatggtggcgcatgcctcccagctattcaggaggctgaggcaggagaattgcttgaaaccaggaggcagaggttgcagtgacccgagatggcaccgctgcactccagcctaggtgacagagggagactccatctcaaaaaaaaaaaaaaaaaaaaaaaaaatatatatatatatatatatatatatatatatatatatatatatataatgtcttatgttcatacagcactttacagcctacagatattatttcattaaatcttgcactacctctctgtcatagccattgccatttttattctttagacaggaaaaatagggatgtctcactctcatataagctggtctttctcagtgctggctgatgctgcactcatgagtaatatctctttaacgatgactctctcttaaaataaagtgagaggggaagatctttgcctaagaggagttcccaccacccctaaatactccagtgttcacctccccggagtaacggctctcacttccttgccactatgtacgctgccaatcaggaaattgacactgatgtcaataccacctccaatccacggaactcactcagcttttgtcatccatcctgacaatggctctttttcctttctgggccagaatccttcccaggaacacactgaattcagttatcataacctacagtctccttcaatccagagcagttccttggtctcctcctacctctcagcaaacttcatgtgtattcaggcttctcattctgtaaaatgacctcgaacctggatctttccaccttttactatggcccatcccaggggtgcatctgggtggaaacatcacagaagtgatgctgtgctttcttgggggccttcacatcaggaagcacagcgtccacccgtcccgcagtgatgttaaacctgattcctgggtcaagttagagactgccagatttttccactgtatggacaactttttctggaaacaacataaaaacattgaaattttgggtcatcttaatgatgacagccccactcccaaccaccaatcttcaacactcttacttttaaactgaagtaaacttattaggtgaattcaagaatataaagcaaaatcgagggtttcagaaaggtggaatggaaaatagtcctgctcgtcagctttgtagcactataatgtcttgggaaaaacatgactggcttcaaaatcaaaacatattaattttttgaaaaaaatacttatttgaaaaatattgatttttttgtcacctttgaatcagaaagattggaatctagctcctgaggtcttgtggataaacttccaaaaaatccttggctcaagctgtggctcttctcttgcagtcttaaatagttgtcccaaattcctttcctcttcctagattccatatatagtcttctttatgtttcaatggtctgtggccttagaatcttgaagagttgaaataattatctgttataaaaagtggggtgttagaagttttgtgtttgtctgtgtagtgtttgcaattgttggtttgctttttgcttttaccaccttcaaggattacaatagattttactgcatagagccatagtggacaggagataagaggctggagacatcgaaacatcaactttcttctttctattccgcctccctaccctctcccacatgcacaaacacacatgtgcacacagccatcttggcaaatggctaaatctcttccgacccagcagataagtcataaaactctcaataaatcgaaccaagaagactagttttgagattgacttttttctccttttttgaaccactgctgaagccttaaggaggctgcagcccttgctggtgctggctctggcagcagaactcctagtcatgctcagttccacagcaaacagacctggatctaatgctgaattataggctagagaaggagaggactcaaggggcagataatcacaggctataaataccttcaaggtaacaatgcaaatgagggaagggaattgttcatttgctcagcaggtgctaggacaaggagcactagcttaaagctgaggaagagaaagtttaagctggggattagcagagaagctcctcacacagagagtttcctgcccagggctctggacttgggagtccagtgccaggtaccagggacagaagcatgataaaggcattggaaagaattcctgctcgattcaagggtcacagggctaacccacagctttctggttgttatctatattcttaggatgacatatacacactctcatttgcctccggcgttcaatttatagcctggctgttcaggaaacaaattcctctggttcagttccttgtggcacctggaaggataaattccaaatctcactctttttttttttcttttgcccccaaagctggggttagctgaattcatgataactaattctaaactctgataggtgctaatcccatatgcaaagatatagggctcctgaactacatttggcaggtagggaacagtcagatgcttaaaagatattagccaccactgaaacaacattccagtggtaaccattactgcttaaattattgtctactttctgaatgtgtgtcttcatggaacttgccagaaccttcctatggagaggaatcagtgtattcccccatggtctgctttcctacacaaatgtccatagtttccaccctggtttcatggctcatttcctaaggaggccttcgctcagctgtgtccaaccaagtctgggctctattgtttgtgatttgtcttccattccattgccctcattcacacgcgttgagtgcttaatatgagaaattaagacaataaggacataggcaaatagaacttttccttaccaccctcctctcaacggtttgagggagcacttcagtagtgaaaggtacatggatttgaaatcagaaacaccgagttccagtcccggattggtcagtttttaatgatcggggtcattgacttgaccctacagaatttcagattggggataataaaatctacctaaaatgtaattgtgagctctcagttacacacacacacacacacacacacacacacaccccccaaagctttgacgcagaggagcagccaatactttgtggacaccagcatgcaaaacacagcggaaaaagtgcacagacagaaagagtgtgaggcagcattttactcctccactaagaaaagctgaaaaatgcagtaagggcatttagaagagagaaagatatccccacttaggaagtaccaaaaaggctatagggttgtcatattttcagcctacaatttgtttctctccaattattgagtaccttgtctacctactcttcactactgaggagtaatgggggaacaggacaggtgaagatgagaagtgacctgcattcttgaagagacagggctgtggatgcaaattgctattccaagtacaggcacagcacttgcaggacagaaggttgcggggctgaccaaagggtgtgctgtgcccatctccctctccagtagagaacaatgtcacacaactttcttctctttgcctaacatcaattaattgcgatttagaaaatagggtgaaatccaggaagagcttcacagaggaaggatatattccaacaaagggcccaagtgagtgtcttgcctgtaggaaaaggataacagcagaatacatatgtacattagtcagaattatctagagaatcagagttggtaatcaatagggtgtatgtgtgtatgtgtatgtatgtgtgtgtgtctttctatctatctatgtgaaagagcgagatttgaacaactagttaatggaattacagagaccggcaagttcaaaatctacaagatgggccaacggggaagagctggtgtcccagctcaggtcctctggctggcagaattccctcatcttcaaggcaggttagtcattttctattagaaccttcaactgattggatgaggctcacccctgttatggagagtaatctgctttactgacagttcatggatttaaatgttaatctcatttaaaaacacctgcccatgacatctggaataatatttaatccaatatctggatgctgtggcccagatatgtggacacataaaattaaccgtcacaacatgatagagaagttacttcatcacactggtgctaaatactgctctctttacattcggagtatctcgtgaagagagtggggtttggactgagccttccatgatgggagaagttgagggaaaattcaattcacaattccggtgaggaatgatgtatctgctggatagaaaaagaaagggaacaaatattctctgcttatttgtgatgggttctgaggcaggcaactcttagcttaattcaagagatcttatttaccatatttaaacatttaggcttgctgcaatgagcaattgataaaaggtaggagtttctacttcactgtttttttttcttttcctgagaaaatagggaataggtcaaaaaagttcaggaaaataacgaatgaatgggttgaggagaaagatcaggctgtgcaaaaagcacaagcagtcacactccccatgacataaagttgatgacatatcctgagtgcacatttctactgaggaaggaaaagatggcagcacctgccaaaaggacttctgtgctccgtagcctcacacccagaatatgactcaaaccgtccccatgaatgagaaaatcaaagatttttttcttgggctgtttgctacttgtcaagacttacacatcaggacataaccttttcatgccaattatagtgcatcttctaataattaaaaaggaaaagtcaaaacacgaatatttcatattcaaaggtcacgctatctccagtctccttcccaaagctggagacggggaactggtgggcttctccatcatgatgccacaaaatccaaacggaaatcatggccacttgtctacaagtaggtcacctcttctctctcaaggcatccagagccagagcctgtccagatcacagagagattctcagacacctttgagttatggccatagtcacagagcctctaaattaacagagagggagagagaaaaaacagcaccaggtatatagcgccatcactgttcaaatgaagaaactgaagtctagagaggagtgattttctttttgcgacacaactaatttgtggcagaatcaaggctcagactcagttggtttgacccccataccgtgcacattctctttggcttagtttacgaactcggtgtctgaaatattaaagcaaaaggtggtagagggaagatgacaagccagcaccaaaaccaggcgtggtttccctactccttcaaaggcaggaggctgtagttgattttcaaggtaaacttcactcccctaccaccccctaaaagtagaaagggcagcatcatatctttgtacgtggacaagccctgcttttcatggccagatggcattgaatgggagtgggtcttgacttttcttttattaaagggatgcatgtttgtgtgcactgggggaggaagtggccatatgatagctacaaataataatatttaatagttactgaatccttaataggtgacaggagctattctaagcccttcacagggataaactcatttaatctgtacagcaaccctacagactagatgctagtagagtccccatgttatggataaaaacactaaaaagttggctgggcatggtgactcatgcctgtaatcccagcactttgggaggctgaggcgggcagatcacctgaggtcgggagtttgagaccatcctgaccaacatggagaaaccctatctctactaaaaatacaaaattagccggacatggtggtgcatgcctgtaatcccagctactcgggaggctgaggcaggagaatcatttgaacccgggaggcagaagttgcagtgagcagagatcgcgctattgcactccagcctgagcaacaagagcaaaactccatctcaaaaagaaaaaaaaagaaagaaaaaagaaacagcaacactaaaaagttagaaggttttaatattcccaggtctcatagctagaatagggcagagctgaggtttgtggctccagaaacagtgttctgaactcccacaccacagcggccatgtagctttgggcatctggaggaagtaccgcctgtaaccactatgacattccacaaataaacaatccttgggtctagcacagggaaacacgggtcccaggggaaacaccaagaagagcacacagtgatcggaaatcatggaaagggggccattcgggaagaggctcgccatcctatcttgagctggtgattgacaaatcccataggaactatgtcacctgtgggttcctgggacaaaacacttctgtacggggaaagaagacaaaggctcttttgtagaatacaatggttaataattcttgagtgcttcctgtgtgtcagggctactcttagccctttaggtgcattcaaccttcacagcataccatgaggcaggggcagttagtggctctattagctgaggcacagaactttgcagagcaagagcccagcattacagctgggtaacagctgatgctgagacccacggtttgggtcaagcagtgtaatccctcatcctaatgtaaagaagagcctcagagtagagcagggttgacagaggccacggctctgaggagtgagtaggtctgcaggtctgtgaagactggacaccacacctcacccgggaagcagagagggtagggtttattcattcatccaagctgagcacctaatgcattccaggcactgggtatacaacagcaaacaggcaaagactcctgccctcacagggcttccagctggagaggaaaaggtgataaagggaagagagatccggcatatctgtgagaaccaatctagcatggtggagcccttccctcaagcctgcactggctacacaactgcgggcaggtgggggccccgtggagagccagctgacacataaaaatggccttttgcatttctgctgacatgtcgtctgtatctgatggagcaacgtcttcattatgaaattagatgaaaatcccgatgcacaggctaatagcatcccacgctcttcctcaggggctgagcagcagaaactgcaagagcaaggagcagagccagagcctgcccccaccccatccaattccattttcatacccacctgtcatctccccacaaacgtcattagttcacagaggggaaggagtctcattgcattatcagccaccacaacaaaggagctttttgtactgaggccgcggttgaattatggaataactagatacatttgatacaagaggctccctgatgggacagggctccctggggcccaggttccttatctccagtgcaagtgtgagcagactttctgcttaggaaggctgcacatggtggccactgaagaccagagaggtgtagttgatgagacagcaaggtacgagaaagtggggtacgtcactctgatttctgccttggaaggctcttgggttcattcttttccacccagggagaaagaaagtggattaatacctggaagattaagcacctgactccctgcctttccttcaatctcctagttttcccaagagacccctctcttccccaccagccctgccaaccagtacagtttcaaccttgccgttctctgagggcaagccaggcacaagcaaggctcagtgaagccagtgcctgagtttgatttaatcctgtccagttcactctgtcctggttaaatgctttctagccatccttccctgccatgcatctgtttgtaatggttcacgccatgaaaaccaccagcttctatttaataaaaccaagcccccacactcccactggcaatggaagggccttggacctcctggctgtctctaattcctgtggcttcatcctcctcaatgaaattctctgcccaggcaggctgtggaggagactgccttggcttgggagcctcttccccgttccccacctggggatgcaatggttttgctggggcagcagttcattatccagtcctgagttgagtcacttttgctcatatttgcactctacctctaaaaagatcccttctaactgggtctgaggcacgcctcttgtgtttatagagtaaactgtccatttggtggctgctgtcttgctaactcggcagggattgctgtttgcttgtgtctccttctgtttcccaggtgcagggctacactagagattcaggtgagatccctgcagaggccagggagcttgagggagctttcctacaaagctctgaccattaccctggtaagatgacagagccaagctttgctaacgatgtttctgtgctttttagcagggaggaagggacgctgtgtctccatacatccctgaggaagggcttgctggtctttatctgtcccgctgggatgatactaagacctctcattgatagagtgcctactgtgcgttaggcactgttctgtgcattgtctcatttaatcctcatagtagctccgcaagcgagcactaccattctcattttacaccttgtctaaggtcaaataggcagctggtaaaacccccatcagtatagctctaaagcccctgatgaataagttctggagaagtaacgtacagcatgatgactacagttgataacaatgtattgtacacttgaaatgttctaacagattagattgtaagtatttttgtcacacacaccaaaaagaggtaactatgtgatgtgatggatatgttaattagcttaattgtggcaatcacttcacaatgcatacttacatcaaaacatcatgttgtacaccttgaatatatacagttttatttgtcaattatatctcaataaagctgaagaaaatgaaaagactgagtgcctgggaacaaaaacaaaaacaaaacaggaaattcagtgaatcctgatttctaacacaatgaaacccaaactgtctagcgagccttgtgggcttctttctggcttcttctcctgccattcttcaggcacaagtcacttttcactgtgtcttaccaaacaggccaagatgccttaaacctcagcttctttgttctttctgttgtgtgctacaaattatctgattccgctctccaattggtaacttcctaccaattctaaaaaaactacagatccatctcttctgctaagtgttcccaaatcctttgatccttagatggactcatcttcaaaatttcagacttgttagatgccactctctttgctcccatcgcactgtaggtaatgtgtatacacatctatcttccccattaagttatgagccaccagaatgcaagcacaggacctcctactgcactgttgtccttgtatctagttcagtatttgctatattgtggtggcttatcagatgattatgatagcactgttctaggcactttatatgaagaaggtactattattgtcatcttcagtttacagatgagaaaaccaaggcaagaagagagtaacttgccacattaatccctttagtaagtgaaggagccatgattgaaatctcagcttctggcttcagtgcctatactttgagttgctactcaaaactgctttccagtaaaatatttggttaaagaatattttacgaggccaagctgggtggataacctgaaattaggacttcgagaccagcctgattaatatggtgaaaccctgtctctactaaaaatacaaaacttagccaagcatggtggcgtgcgcctgtggtttcagctactcgggaggctgaggcaggagaatcgcttgaacccgggaggtggaggttgcagtgagctgagattgcaccactacactccagcctcggcgacagagtgagactcgatctcaaaaaaacaaaaaaagaatgaatgagaccatggataccacccggcctgttttggagagggcatttcacactgcggagaaatgcgtcgttcattcccctccagctcatgactcattttgacccatctgccagcccggatctcctgccttaggaagtgagcttggcacaggtgagggctgttctcctttcggttcagccccaggtttggttccttcaggtcaaaggtcactgcagcatcccgagacaggtctcttgtggtacctgccttcccactctttctccctcctccttccacttccttgtcgcagatgtaaaatcctcacagccatctctgacgctgctaaccacaggcattcaggaacagtcttgctccaaatcctgcctcctattttcatatttcctgtggcgtcttatagaaatagcagaacaattgctcatccacagggggtaaagggagcaggattttatataattaaattttaaagtgacaagtttttccagcctgtggggtaggtagagggaaggggagatgagatgaagacctcctgcatttaaagaggagcctggtctcggcatcggcgacatagaatctagctttattcctctttattttttttttttttattttaccagtgacaaggaccgtggacataatttgtaccttcggtgcagcctctcttttcattgagctgcagcagcattgagtgctaaatgagtcccttgtcaaaggctgcttggagtcacccacttccaaagggagcgtccggattttaggaagtgttggtaatttatttccatctcctgcaccagtgcaagagaaaataaaatgatggttcatctcccaaaaggaacattcttaacatgataagggacagagatcagaaacatctgtctgtagcaagcaggcctggagtttccccataaacacaggtttccatgcaaaccaaacaaaggagcataagatacaggccaggcagattccacttcagctcccagattgaagtaagtctcacagcctccttccttttaaggtaggggaccagagggccagcctgggctctgatggccacaccccagcccatacccccagccaggctggcctcacacatcacgcctgagtgcacagcacacaccactctccagccatttgttcctttgatgtgtgctaagcaaaacataattacccactttgtcatattgcatgtgactttgacggcccagtgtgtgggcctttaaaaaaaaatacattagaaggtcctcaagggaaaacagtgctccttttagggtttgtttcaggacttccacaaggttctaaacaacagactcagtggagcctgtttgcctagtaaggagtagggactttgtcctcaccgcctgtcacttacaaatagagagaaaggagagaatacgaacaacagagtgggaagtgcaaagagaggcacatctgaggttttcatgaagaaactgggggaaggaaagtacaggaacccaagaggcatggagcactgtagcgcccctcttttgcatgagggatcagtagcatccctcttttgcatgataaattgtttccaaaaccaaagatggatgtctctgcaggaaccctctccctccaccttcagaaacttcctacttaggcatgcatttagctcctttcccaaatcccttgtattcaaagtctcatttctcttgttcacagagactcctccttctcagcccacccaaagctcatctctccagcagtgcactcctccctgacccaattctctgctccaaaggaaggcacctggctactttaagatagcagaaatatgcacagcacacacaggccctctctctccctctctctctctctctctgtctctctctctctctctctctgtctctctctctctctcacacacacacacacatatccacctcacccctgaccctcagagacttcccctctttgtagagacacacaccataccccctggaaacagagctttctaaacacattctgaatctacaaatgctgctagggctcaggctgtgaggttccttaaatgtgaagtctgctcatgactgcaattaattggcattgctgtgctaatggtaaggcagcctcctgtaataaccaccagcagcctgctgagtgcagggggagacagtggtaggagctgagccctgtgcgttgtttacagtagaggagacgaggaaactcatgagcgctctccttttttgtaaggcaaagtttcacaattggttggtattagcaattttcaatcatcttttattagtgctagattgattttctgggttttttttctaatgtatgaaagcagaattctctgaacaactttcatccctggtcagctgattaaaaatagcaccactacccagttgcttatcaagaagctcagaacgagctcctcgtgaaaagctctttggatgggaacagatactgtgtgctgctgatggtgccacccggacgcatgctaagtgagatggttatctctgggatgaggttgacttgaggatcccctactcattgtctgtgtctctggcagaaccacttttgacagtgggatggcaggtctaggggatttgtcagaatcattcattccttcaaccttttctgtcctcattctgggcaagcacgtccctgatttcagggtgcaaatgaattccagctctcctctagcctagcgagaggagaatgtgcgaatttgtttagactatgtcagctctctagggctcatttcctcatctacaacatgggcacattgatttagatgacttctatgagtcttttcatctatcaagtaaattggtctaataaaaagactaaggtcttagaaacaagctaatcccttgtagggaggataccatatgttgacacccaactatatcagaaggcagtgtgttcaatgtgctataggagacacaaaacattacaggcattcagaagagagagatcccttctcactgggacgaccaaaagacaggactccatggaagggttgcgggggcagtcagtcgaagcgtgtcttgaggggtgaatagtgttgattgacagagatcgagatgaggtataagacagggttgaccacaagttggggaaagcacttgggaagatgctgtccagaagtatggggaatctaaatggtgtggtgacttgacttccaaaaaaagaggccttttcaaaaagaagaagcacatttcacggggccacacgctgccaagagatcaaggagtttagccatgacatcctgagcaagcagctctccagatgcatagcaggcctctggttccccgaggactctgcccactccaccagtggccactggaaagcaccccacagggctctctgcggtgggagttgtgtcactggtccttgagcctggcagtgtctataaatcccatgtatttttctgtggacaacaaatgctgccttttctgatattcagaagtgagataaatggcaggcctgttacattgctcagacattttggactttctttctctctcttttacatgtcccattttttcactgggcctaattcttgacaatggttctgattctcattcgtctgctcctgaatcatagtcttccttttgccctttgtaaattatctctgttatcctatctaaacacttcttactctctaaaatgagccacagcctagggagtatttctcaaggagagagggtagcttcttgtatttattaagctacagcccagtaaaatacactgatttggagttagacgactaaatttgaaaccaaggtcttccacattccactatgggaactttgtcagctgctcctcttcttcctcctccccttctcctcttcctcctcctctttcttcttcttctttcctcctccttctcctccgccttcttcttcttcccatttaaggcttggttcactcatctgtcaaatgggacatggttctgctagacagggtagctgggtgagaattacattacatgataaagtataatttattccgcaaatctaacattttgatatcaattatggttattgtaaccgtgcaaagagagagaatctttctcattctcaaaagtttatcaaccatttcatgaacaaagtaatgcgtgtgaattacaattgtgtgcacatagtgcatcactcctctcagctgtgtgtaatttcctttgttgtcaggaagccctggctgatttctaatttaaaagtaaggcatgcagtgctttgccccctacttttctctgtgtattttctactagatgtggggtgcccccagtgcctctaatgagcatttgactgcattgtcggcatggtgcgggatggccacatgctgccctcttgttaacagacttgagggtggaggaaatttaaagacgctgctgcctccaagctcatcaggttctcctgtcaaggagcaggtgacactgtggactgggcaagaggggtagccatagctttgaccttgcccaggccagcccggcatccccaaagagccagagctcctcctgacaagaatccactgtgaagcggggcatctcattgcagaaggccccacagcagggccacctcagcatttcagcttccagacagaaaactcttctcctgcagcctgctgttcttccctgggaacagccttggcataccctttctctcccttacagcagagctctgagtgtcacttatggagctaagaagtcactttggactttgagctcttgttgggggattctaccttgtctggaagggcagaaggaggcagaaaaaccaagaactttataggagaacagcatattcagcccgaatgtaggatgtggacattgtggtctggattattggtagggttgggtattagggctagaattttaaaaatgtgcactagtgtatcaattattttgggtgctcaattgtttaggtgaagtccctttgaaattgcagcattgctggcctaaaatatatttgaaagtgagaatgtaggaggagcagagggggagccagaagcccactcatgcaaatacaggtatataaatgagtcagtttcctccttcgtaaagaagaaaatgattcggagttgctttgttggcaggttagctaatgagggggtgttgtgttaattaacgttgcaaagaatagtgaaagcattaaactttagaagtaccctagtgcttctaggagtattattcttggtgcattaacaggctgggtctgccaatgtctatgagagtgagggaataaacgaaagctggagcagaaggcagaagacgtgtggacacagcagcaccagctcggggctgagtgaaggaatctcaaagtaccatcttcagagctttaaaatatctttctcccaaggaaatggaaatggaatactttggatgtttttggttgcaagtaatcaagccccttacagcagatgcttaaaaagtgagggcatcaaggaagcctggaggtggggtgtgtccatgctcagcaatggcctccaggacccaggacctcagagttggtctccatcatgctcggcatgtgagatctgcgtgtcatgagtgaaaggtggccacctttcttcatctctcacaccatcacctaaccatgatcaaagatagtaatcaagtgggcctggaagagggcgcatgtttctttttgatgaggaggaatatctagtccttctactgtgtaaagtgacctgcatagctgcaaaagagagagaaaggtgaatatctggcatttttagcttcttttgtgggaggcaggctttgccagtaggaaagaaggaaggagagggaaaggcattttatatagaagtcagcaccgaacacctctgtgaacaatggacttctggataacaatctggtgtttgttgggaaatactctgtgagcactgggggcaattgtgcggcttctcttcaaccgccagccacatgcttgcctaattaggagacacgagccagttactctgctgtccccacctctccatgtgttcaggcttggtctataaagtattggcctaaaggcactttcacccatacatgggtcatccccaccaacagattcaccctggatgtgcatatgggatccgcactgtggcccttccacataagaaagtaagggagtgaagacttgggaagatttatgagctctgcaaaactggatgtggtaaactatgtgtatggcagctctgaaaagcagtactgagcctctgcttggggcctgacagacatggaggcagttctattgaaaccccaggcaaagggcctaatgagaaatcagtcagatgtgccgtgacactgcctaacccacaggcttccatctgcttgcacccttcgcttccaaacagagcaccagttgtgtttgttcagtgaccaactggctgtccatcgcctcacctcctccagattgcaaaccaccagcagcagcccgggctcctccctatcaaaccagagcagcccagggaggttgttcatcctcctccctctttcctgatgcatttttcatcattaaagggaaaatgtcattttggtgacagatactagtatgattggtgtcaggaatgaatcttcctttctctgtcagccttgcttcacacaatcctaagacaatgttctgttgaaaggccacttccatttccaacgccagcagtgtgggagaagagcaggctttgctgtgacggatgggtctgccaaggctggcgctgtgccaaggggtgtaactgaagctcgacccttgcacaccgggcaagcctgaagaagcttctgggaagctcaagtcttatttctggagggattctgctgagaacatatcttaaaaagagaaaacctgcagctctattcggtgattaggttttaagaggtggaagagttgccatcatcactgatatatagagtcccataaatccaaacccgtgtattggaaagctgatctggaaatgaagatttttattttctggcagcagaaatgtaggtcagcctctctagatcttttccaggtgcaggcctggacctggcatgggctggaagtaaccatacatttcacccatacagtgtgcctcatctgacactctgcataccacaacctgttaggactcatttacagcttcgttttctcatgcatgaaataaaggtaatagtacctagactacctttctcaatcactgagaggtcattttatttcaatggatatttgttgaactcacactcagggtcatatactttgctcagtgttgggcaggtacaaaaatgaacaagaaatggcaactgccttcagagagcttacaacctagttggtaagatcagacaaatctacagtccattacaatgtagatacacatacacacatttacagagttctagattgtgaaatatatatatatattatttcacattatatatgtgaaatatacatatatatgtgtgtgtgtgtatatatatacatttcctttaaaataattgatttcaactaatagaaaagagaggcatgggaagcattggttaaactaatgtttcatggaggaagtagaatctgaactggttcttgaaacctgaataggatttagaaagctgtggatggtaggagggcatcttggcagagcaaaagtctgagcatctacacagtttgtgatatgcagggcaactttccaagaagaacgtctagtccaggttgattgggtcctaggatgttacatgagtgcaaaaatgaggccacaacaaagactaacactatttaattaacttgggatacttcttgattgtcagtcttaagagttgggtctttatgtcataggcagggggagccactgaaacttcctacataagtaaaggacatcatctgatccctgcctgagaaagataaagctggcttctgcatgtgaaatgccgtacatctgctattcttaactttttctaacataaaaatcattgaaaatattttataataccctcattactgtgcagaaaataagttcacagataacatataacacctatcacatacttcaaaaaatgacctatataaagtctgactgaatctgaaggagaaataaatagaaaatgattgataataatataaatgtaaaataaatatttggatacaactaccccataggatataatgaagtatggaagcgtctatatgcagaatcaccatgaatgtgacagctaagcaacagtagagacctgctacaaggatgtagaattaattgatgactcaatattatgagaaacattcccactgagtacgtgatttttcaaactagtgaacacttcttggtaaagatgtgaacaaatcaaacacagtctttctttgacttgcaggatagttgcattcctggagaattagcgaatattaaaacctggcaagaatatctgtgtttacatgccaaatggagtacattttaggctttttttttttttttttttttttctctgagacggagtctggctctgtcgcccaggctggagtgcggtggtgtgatctcagctcactgcaagctccgcctcccgggttcacgccattctcctgcctcagcctccggagtagctgggactacaggcgcccgccaccaagccgggctaattttttgtatttttattggagatgggctttcactgtgttagccaggatggtctcgatctcctgacctcgtgatccgcccacctgggtctcccaaagtgctgggattacaggtgtgagccaccgcgcccggcctaggcttagatttttgaaagaaaaaggtttcactcacctaaatgtctggcaggcatttgacgtccgtggctgaatagccatgcgttgctgcgtctctaacctctgcggcctctgtacactaaacggcagcagtacctctccaattatggtggtgaccaatatccaatcaattttccactcccacaatccaaggagtgtgccctgcccctgttaagaagcactgactaatgcagaggcagggttggaagcagagagatgagttaggatttaattaaaagagtagagagagaggggaaagaaaaaaagcaagagagccttggtggtagcattggagactggcaagaaggaaaaaaattaagaggcactgatctaccagtgagcaaagggttggcaatgcccttggtaaagtttacatcactgtgcaaatattgttgcagttggagttaaatgtcatcacactcactgtacagagatggtatctgaagcactgaaaaggtgcaatgacttttgcaaagacacagcacaggtcaggaattgtgttagacacccagtgccttagaactacacttttactgtaattactaatgcaaaggagcttctactcagcatgggaaattataagcagaaaactcgagtagagcaaatataaaggtagaaataacttctgaaaatagtcaaattccaagtattctatttatcacctcttgatggaacacctgggaaactctaggattccaaacaaagaccaatattccacaatccatccactttttttgtttgctcatacctctaaatattcatcagtaacatttgagacaaaggaaagagataattatgaggggagagtttttaaaagatattaaaggttaacagaattcttggcatttgtgtcgtgtcaatttccatgtaattatgctcaattcccagaattcagtgtcagttgtgcctgttaatgcttaaagatgatatccttggaaaataatttataagatcatttctcaaatatttcggattcaaaccaagcaccctggctaataggctgattattattaatgttattcttggatggagagtgctaggaggtcgtaagtgggatgttgggatcaaagtggatttgttatgagagtgtggttagctatctctcctaagagcagaatgactgtgctcgaaatgtttatataacctgatttacaaacctcttctatttttgtttgataaataataagaatgtgggaaagcacgccagttctctggaatatgactgccttttagaagaaggaaagggaaccagtgctgatgtctgcctgtggggaagtatgaccaactggctttgtggaaaaacattgagacgcacaggcctagatattttttacatgtttattcattcgttcattaattcttctcccatttatcattgaatgtgttttacctgttctttgctgagatcgagtgattataaataagacactctccccttttctgttcttttgaaattgtgtacattccctttgtagtattgactccaattgtgattcattgattatctgtgcaattatttctaacattcatctcttccagcagtctgtagccatggaggttggataccaaggatatgacagtccctgatgtaacacgccacctaccctaggatatgcttgttgaataaatgtgagaagggtgttctcatccctactgggcaatcaaaaataatcttttcaactaacttactctgatcttgatttgggagaacattttctaaagccagtctaatcttggcctaccatgtttttcaatctcttgggctctgtgcatttacacatctgtgtcttcaggaaatgaaattgaaaaataatctagtttcccccaccttctgttgaggccaacgctgtggagcacaaagtcgagaactcaggctcatgcatgatctattgcttgggatgattgctgtcaccattctcttccactagagcgaaaaatgaaaaattctatggaaaacaaattgcttcccatcacgctctaaaatgtaggctgacacggggatgcattgaggtggctagaaagagctaagacagagtttagagacgtatgtcgtaatccagctcttctggttgctagaagtcaaacttttggaacgaggcagccaagtgaagtgaagtatgtgtccaaggtaaattcagaggcagtgtacaaaaaacaagtgagtgcacagaggagcaggggtccccagcccagtgaagagtgaaagttggaggtcatacatggaggaaacagccaagcatgtgaaggattggaaagcaaggcgggccaactaaccctgcctaaagggaactgttctcctcctcagggggcatttccacataaatcatgcacacacttttcatagtatttttaaaaatgcctttaccaagtgtacataaaccttctacaagaagttgtaacataatgtaggggtgagagaagggcgagataagcataattgaagtatccccagccaggcagaaaatggaattactgggtagatgggaccatgacattagaaaggtcacactgggtcacataaattcagatgtccgagttacctgctttggacagtggcaattttacatgagtcatacttcaaaggttacagatatatagcagatgcctctaacctaacaaacagtgtgggtatatcacacgttaatttattcaaaccttttcatatcttatttagagattatttttgtctgtataagttttattcagacatacttgtttttatcctttaactactgtcttgatttcttaagagtttttttattttattttagctagagtttggtcattaagtatgtgttcactctatccttatacatcgtgaataccaaatgtcatcatcaatttcatgttcctcgtttgtagagatttggaagtccctacaaaacaaattatttcaatttttgaattttcctcagctgtgctggtcacttaaatacaacaaatatttatcaaaaccaattatgttccaggcattgtgttaggtttcaggaatgtaacagagaaaaagacagaaattagaccattacatgtattctgagtgttatgcgaggcactgatgcagagggcatgtgccaagtccagtggactagcacagtgaggccttcatgagccagtcagaaccgagaagggtgacgacaactcagcccgagaccatggggactgcatcctaggcaggaagtggaacatgcaaagtccctcaattgagaaagaagaacctctgaggaattagaagtgtaatacaataaaacaaaatctgacatggctccaaaagggaagaagaagtagttgctaaagctgaaaatacacagatgccacgtcctgagggctcagaaaccacaggaaggatttggagctttattcaaattgcagtgtggagccaccaaagatttaatcaggacagtgacaaggtcagatttcaggaaatcttcctttcaatgtggagattgaaacagagctggcaagagcagaaggaggacatccacgtaagatgaatttcaggaatccagataagaaaatgaggagatcttggcttgggccaggcaaggcagtggaggttgagaaaggtggatggatgtaaaatatattttggaggaagaacacaggaaaaagactgagagagagaaagagggagagagagagagaaagagagagagagagattgggtaatgaggggcagtgataagagggaagagattaaaagtgactcgatttctgatttcagcagttggttgcatgaagtttattatttgtgagctacagtgataactactataagcaatactaggagaatttttatggaacaattttgagtaaaaataacatttctttctcgttcctattttttctaataccctttttagtgttttccataaaaatgtttgggccaacacttgttttttggcaaaaattcctgatacctgcagaaagcaatctatagtatcatgctccaatatgtgttgtaaggatcatagcttgggaactgctagccatcactgattccaagattactttcctgggttgtaaaagaataatcagtagcaaccatttgtggagttggtactacaggccaggtacttcactggtactttacataaattatttcatttaaccctcacagcaaatataagaggtaggtattattcctttttaatagaagaggaaaaggagactctgagaggtgagaacattttccaaggtcaagctggtaatttgtggaacttggacataaagtcaaagccattaactccagcattcatgcccaatcccttccacatcactgtctcttcatcgactgcctagatgccagcaacttacatgcatactttattttttctaaagtatcttccattatatttggccacttttccacatatccaaataactttctggattatttgcagctcatccatgtgagctaaagttttaattacttaagggaacctaatgtcttctgcaaacttgggagagttctctatgaattccctttgacagatcattggtaaaaatattaaatttgatttgtcctagcaactgtcccttggggaatctagtattaatacttggccatatagaaacatgtcaatctacccttgatttatatcttagctttaagcagctctctgcctttgaaaaaaaaaaagatagtcttctcattactcacttttctaaaaggtatctgtgatcctgacaccttgtcaaaactgttgtgaaagccagggtagattatttcatgtgttgtggtttattcacatgcacgttgacaacattttccaaattctgcctcctccaggttcaaagctacctgaacagcacataagttcattttcctaagacactcacaagttgctccttctttctcacgacctgcagtaccactggtagttttgtgctaagctagtgaaggaaagcataccaaagctttagggaaatcatttctttctgggaggtgctgcccatgtcaaccccaggttgggaaagaagcacaaggctgtgatgccccaagggcaacctcaattactttatttagaaaggccctgaactcacgatggtaatgcatacaggtggaccaacaaggtgaaagtcacagagattcacaagcatacagaaatgcattttattatttctttgtaagagtcaataagtttgtcagagtcaatagatactttaaattgaagtaaagaattaaaaaaggaagtggatagtttgggtattagtttagctagaaatacaaagaaacttgacttctagggcagtacaaattcaagccttccacaaacaaacagttgagagtatgtttatcttcttaaaatgtgtgggtgccttcccaccacttcacctgctcctcactggtgctttgtcccctccctactaccattcctgtcccggggcctgcaaagcaaacagtgaacatttacaaatcaaacttggtgaactaaacatttagaaccttagagtgaacgattttagtctcatccagttcctgcttccccaaggaaagttcagattctgtgcagccttgatgcattggtttaaagttaactcagtttgaacactaacccctctaattaggtgtttgtttgaaatccatgtctcagtagtcaactgatctgatgaaactggtatggtgtgtctgtatatgtttggtgtggaaatgtaaatgggttacaatcccagcaaaataacatcacagcagttcatccaggtccacatttctaataaagaatattgattgatttcagggatagcaaatatcagttctacccaattacactcttgctgccccttctaaagcagcatgactcaggaattatttcacggcacttagccttttatatacaactgctattataaaatgttctctgtgacacataaaattatatgtatgtatatgtatccgtgtgtgtacagaatatgctatgaacatatgcctaaatggcttatctgagaaactcagcagagattgagataaaacacagcaggatgagtctaaaccatgaagtccagaagaaacaaacactaacagaaaggagagagaatccaaataaaaagaaaaggtgggaagaggtagatacaggaaacacagaaaaaatcccttactgaagagaagaaaaaaaaaaatagggccgcggaaagttaaaggacagacagtgtgcaaccagtccaatagatctctaaaactcttctaacccggatattccaatagtctagtcatggaaggagtgtgtaaatattctctttatggctggatgcctagcatagactgtatctagatagccatgtcccagctaggctttaggggaagattcccaaatgggcaattaatttagatttaataggaccgttactgtaagtttaaataaatgccagttaaatattaacagcgtatttattgaagattaacattgctggttgcattgtgggattttcttttccttaaagaaaccctttatcagaagacttttaatcatcttgactcttccgtcgcttgcctcagatccagggcagctcattaattactttgtacaacagttttcaacattctgaagtggttacctagacgaatgggaagaatggaaggccatataagaagggctatttctgtgcaggaaggattgatgagtgaatttgataagagtgttgagaagcattataatcctagactattagagttggaaatgtcctgggaagccatctcatccaaactcctcatttagaaggcaagaggaagagagcagagctattccagtgagctggtaaggggcagacttagggctggaattccagaccctggatcccagccctttactgagctgtcaccgtactctgaaattgttcctttaattctgcaaaagtgcattaacccatttgagtgaattagtcattagaccttctcagtgacacacagatcatgaagatttttttttgttttttgacaaacaaaggagctaaaaattcaaacacaagcagtgacttatctaaggtgacaaaatgatgggctgagttgaaactagaactcaggtcttctggtttacaaaatatatttgcacaaatgtcacctccaatacaaagtacagttggacccatatgttattatgcaaattcttatgtcattaaaatttattttgtctgctgttgtttttggatggggaacaaggaataaaacctctaaagaaaatgaggggaaaagatcaaacagagacaaaagttctaggtgattgtttagggagaatggagcacaggggtagaagtaatccaagttcctctgagagtttaaaaccccaagttaaaacctggggttttaaactccaaatttgtacttgataaaattgccattcctagggctctttctgtttgagaaggcacttccctactctggctgggctcagaaacattagaactggtgtatgtgtgtgcctgtagatgaatgtctccaggtgactctttcacagaggttacaaggccaatccctgaatgtagaaattaggagagatgaggcaggcccaagatgttcttatccagtgatttgtttaagatggagacctgagcgtgttgggccttgcatggtcgaagaagctttggattcagccatcaggcaccttggagcaatgaagggcttaaaggcttatggtaggaggtcagacattgtggctcactttacaatgggatggaggtgtcctgtctttttgtcaggtggattggctacttttctgttgtactttcaaagtttcccaggctggtactgaaagagaaagctgcctcctcttttgcaagcacaggctgtttcccacaggcctagagaacagaggcctgacagtggggtgggagctggggggccacggctcttcctgctgtgggtggtctagaggctgtgctacttcctctctgactacatctcagcatgacgttcctgctctgtccgccttatgctgtgaactctaagagcattcccagggcctgcactcagcagtctgctcctgggttctctgcatgaatgttacctgtaggctgactcagaatgaaggaagcacagccaatggcagctccttccagtcccagcatgagaagcctgggagcagccaggcctgtgctaaactctttgcagctactccctcatctcatcctcacagcagtactgagcagtaggtaccatgaggaccactattttacagattagattagggcatgtccccaaggtcccacagctagtaatggagagggtgaatatttgacttctggtctgagtctaaaacccaaggtcacggtccttcttattggataaatatgtactgaatgaatccatgactgcatgaacacacaatgtcgatggcattagaggttttcagtgagacacagagcactcccgaggtgcccatccttagtttgtatgagcaccgtctgaggctgtcaaagaagtttctgctcatgctcctttccgtcttgggtcgtgtagcgtctgtgctgtcttctgccatccacgagattcctgcccatgcttgcccatcccttcatctccagctcacttttaagtccagtttaatgtcacttccttagggaagtttcctgatcttccaggcacgatgagaatctcccatcctgtcttttccattttttttttctcacagcattcatcacagttgtatccactatttcataaaattctttgttaaatgtctgtctcccctgctggaagtgcacttcatgcaggggaggcccacgttacttttgcctatgtctctcccattcattgctttccctggccctgttgagttgatgaagggcttcccaatattcagaagtccttcagagcaccccacccctcctaataccccttccagtgaagctagagaaccaagattgtgcctgggaatctggataagtgtaatgagacaaatcacttcccacaggctaggcagacctcagcttttttgtctcagcaatgagaaagttctcaagggcctataggggagtgcagggtggagttcatttaattttcatgaacgttaatggaaataaaaccactgacaaacccaatagcactagacgacacgcaactcaagggcaggggcatgtctttatttttgttcctctcaacacagttcctggtacacacaaggaactcaaaatctgcttgctggttgattaactaatttgagttcaaccaaataatgtgacacccaaagtgattctgggcaatcatggtaacctgtcctctgggggtctctctctcggccacagatgatgcagcagcaggagttactgagtggtcagctcttaaatattgttcttatctgacaggtagagtagaaagaaccctgctgtaggagtcaggagttctgacttctagtctggattggccagtttataaactttatgctcctacgatcaactcctcctccttcctggggctcaatccttcacttaagaaatgaatggattatactaaagatcttccaaggtcccttctgaatgtatcattctgtgatgttacgagtccagggtcttattatgacccaaaacttagataaaaaggaaagactctgccccaaagacccctggctctcaggctgtcccctttgggcacctgcctttcgctgcgtcggcactttgattttggcttgttcatcctgctccccctgacttttctgtctacctccgattgttctatccaccatcgctctgctttatgcatctcttataaagttttatgggtttaaagtccatagatagcctcacctttgccattccttcatatcctccttctcagttctctctatttgtgacctcttttctctccctggagccctcttccccttttcaagttgcacctttgctctttctgctgaaatcctaacatgttggactatagcccagatgaaccacgattttattttgatcctgtattcatagaggagcaaaaaatagcatatatttttccagttcccagcccttccctactgccctagaggcatctctttatccagatttacacatccttttctgattaaatcttccaatatctatttgatgtcacaccactctctaatggccctgcatttcccatcttctcgcctgcactcctatgtgagatctccaccaggagaggggagcctttagcctttttcgacgaggagaagcagagctggcatttgttaagctagtgctcctcttttcgtctcttgtgtgtgtggaatagtgatagctctttagctggccccagcttgctctgggtaacatggagtaaaacaaaaacaacagctaatttctctttcattgggagttcttctctgttccagccctgcttcagtgtacagatgccagggttgcctgaagtctccatctactgcttcctcacctgcctgccaaccatccagagtacacatggcaggctcttctctcctccctcctttgcagtcccaggattattaaagggaatatgattgtttccttttgctcagggagtgtgtatgtgtgtacatgtttgtgagcttgaaaggcattgtcctatagatattttttataacctgaagcaattacagctgtcagcacagagacaagctgtgacaagttgatttatgtgtacagtatatgtgtatgcacgaaggaagggaagaaggagacggagatggtgggaaagagggtggaggtgggcgctcgttaggaatcggctttcaaggaggcagaaaggaagttgtttctataaagaacacaaataatgaaattgctttgaatgtcatcccttttcattaactcggatatgctgggaaaaataaaataaatccagcagtttttatgaagcaggagacaggatataagataagccactaagtgttggtcatatttagggattaagggctgggaagtgagttgacatatgattttgatcttcatcttttcaaaccacttcaatagccggtttgaataaaatggattttgtcttgttaattatgtgggcatctctgacctttcaccactttctaaacttctatgtttgaataaagtttggatccctgcgcccacgaagcaggtatgaggttgcaagtgccttttctttgccctccctgtgagttacctgagcttggctgggttttctgctgcaactgctggattgctaagcttagtgctttcccttcacgggcagagacaaagatggtttgattgtcttagatcaactgcatgcagactggtagaaaccaaacatctcaaagagcctgtaagaagaattattttcttgcccagacatactaatgaagcaatggcaggcaaatgtattaataaagcatcttccatcttaaatggatttctaagtattttcctgtagagttaatcatatatgtaggcccctcgggaaagcctgttgttgtcattatccatatccctagatgcaaaaactaatgctcctttgtacctacctgaaaattagatgcaagagccaggattagcatttatcatgaatcatccctgccattctcaggcctctagggaaatgactgcaaagctcagaatgagcccctctcctttccccatgactagcatttgtttccacttgttgtagtgaggatgtgtttaagaagaggggttgagagggaggagcataagggatggttgaaatgaatggatgaattattagaggtgaccccttgacttgtggagacgaagcccaaattcagcagactgaaagtcagcaaacatatctcacagctttagtatatcatcatatttatcttaacgtggtgaagtttttcaatttcctgtttccacaattgcccgttggaaaatggagacacaatagaatcttccaagaatggactagtgctaaagtaggttaattttcctcctttcctttcaaaaatacaaacaaagatcttctgctccccgcagatgtaattgtttattcctgatagtaaagtcatttgttgcagccataagttgacgattgatagttttggtgttatatatcaaatgatccccagtggccaaaagtagcagatgagtttccctgagaatttaatatcagaaaagtcaccggaggagaggagggaacaattggcccaatgatgagttaatgcaaagtattttgagatattcactgtaaagtcgcttcactcttgctggctaagcacgtcctagtcaactatgacaatggaaaggcaagccgtcttagtctttctttgttacccaggagtgtggtttccacttctccaaagcctacttctgtcctatctctatagttagtgtgagggagatttgattggtgaaatgtttgtgtcctctccaacgtggtatctacatgtaagtgattggtactgctcgaaggttgccagaatgagtattgtaccgaagcccttatggttatatgactcagttataatggttcagtctctttgataccggatggctttttggaagaccatttttctgttatttaacagttgttaacaacaacaacaacaaaaagcttcctggttgtgtttgatagagtctaggggaaaaacaaagccactgttgcctcctctccatccccaaggagaatgtgggtcagggctggaggccggctctgggaatccctgagaagggagcattattaatgtcaccaccactgtgcctgctgagctgctctgtgcttcccccttgcacaagaaccaggcccagccagggaaaggaaacgcaggccattccctcagagccgaagttaagggagaaataataatacaggcacaggaggaccagcagcagccagagaggagaagtgacagggaccgaggcaaatccagtctctccccgggtttcaagaatttgagaaacacacctcttaaagatgaaatcagctgtgcgagagtgtgaggcccaggaaacctgggagtctgctgtataaatacagcaagtggctcacactcatccacccaagtgagcacttttgcaggcccagcatcttttaatggcgacaaaacaagaataaagaatgtaagtgggtgtctgaacttgaccaacattttgatgatgcgatttttccagtttcgcacactaagaggcttctgtgattttggatttgttttatatatggcagatctctagaatggtagtgttgagtctctggggttttgagcagctttgtggggggctgctgggcgggtgctgtactactgaataactatgaggttcttctaaaacatcctccgaacactctgagtttactctgaatgctaatgggattaatctgatcattttaaaggtgcatgtatgcatgctgcagggtgttcctttcccagttaattagtttgtgacccttattaagatgtctcaagtctgaggctgattaaggctgcatggtaactttgtcttttttcctaatttggaagcgcgtaaatggttaaactcctggcctgggctgggctggtgcacagcctgggcccggcgcggcgggggttaaggtgggcgcccgcgccccgcgccccgcgccctcccgccgggatgagagcgcagtccgcgccgccagcccgcccgctcgctccgaggcggcaccgggagaaagtggcggtcagggatggagctgctgccatgacaaccccggcggtcggggcccgcgcgcgtcggggctgctcccgggaggaaggcggcgcggaggccgggggcggccgctgagcttggcgtccgcgcggctccggtgcgggctgcgccgcgccttccccagcgagctaccgagcttggggccgccgcggtccgctcccgccgcccggcctctccctcctcggccaccgccgcagcccctgccccgccgagccccgccggacagcggcggccgcagcgcgcatttgggctccgaggaagttgaccgaggcggctgccgcaggatcccgggcccggatcgcacgaagcccgcgcggccgtctcctccgcgcgccacccctgcgcctcccgcgagctccacttcccatctgctattgtttccgattgttttccggtggcgagcccggctccgaaacttacaaagtgttggatgtcccccgttcgaactgagggactgcagaccgcctctgggtagctggatgaagcccaccccgtccccttctggtaccaaagtgcttactcctctccaaagtgccgtgtctgaactgccgctgggaagaagcggctcctgagacgcgcccacacctttcacctgccgcgcgcttccccctcctcggccaccttcccggcggaagcagcgaggagggagccccctttggccgtcctccgtggaaccggttttccgaggctggcaaaagccgaggctggatttgggggaggaatattagactcggaggagtctgcgcgcttttctcctccccgcgcctcccggtcgccgcgggttcaccgctcagtccccgcgctcgctccgcaccccacccacttcctgtgctcgcccggggggcgtgtgccgtgcggctgccggagttcggggaagttgtggctgtcgagaatgggggtctgtgggtacctgttcctgccctggaagtgcctcgtggtcgtgtctctcaggctgctgttccttgtacccacaggagtgcccgtgcgcagcggagatgccaccttccccaaagctatggacaacgtgacggtccggcagggggagagcgccaccctcaggtagggagctgacattgttctgcgaactgatggtttgtatggggtcggggtaaggggcaggggtgcaggtgtgtgcactgaggcgtgcctgggttggcggagaggtcgctggttccctgggctgcacaatttatggctgcgctgggggctctgcccgggaatgtggcagtcgtagggaaaggctcagaggttctggcggtgagctttttcccaaaaactggcctctgcggctcaggcacttgttaaaggtgaggggtggctggaccaggtggtcgccgagattgagggacttgtgcctggcactgtctgtgcctgagcctggtggccgtggtgacagggggcttggaggggctccccgcgagcagtcttctctgaagttaatgagccccaaaggaggggtctggcttggagtgaatgcccccactcgcccatgccatagggctttgccagccctggctcctgcactctgggagagccgctgctttgtcctgggcctgactgtgcccgggctttcctggggtgccttcatgccgtgagctggtgggcagacagagatgctttctcctgtctgaacgtggctttctgaggcccaagtcatggagtctgatttgtccgtggaaaatggcatttactgtagtgaactgtgttctgttcctgctctccaccaaaacggtacatgcaaaactcgtctactgaagagaaactaggtttcagtgttgggttgggtcctgattggcttctggggttaaggcttacaggcactgggggaggagaagaagaagaatcttggttatgctttgtgtaaggtagaatgattctatctccctgattaccttgcctgcagaaacgctaactgaatttccagtgttgataaaccacacctctcatatgcgggcaaaacacttaatgattgcgatgggaaattttattctctgggattttataagagaataagcatgaggtggacgttaagaaggttcatgggaacgatttccctgcctctccttggtttagtctgccctcctaaataaagttttccaaactaagcgacagaactaaccacaaggcaacatggcaatattcctgtcctttgcacatgaagatttctggaaagataaccctggtgctggtgtctactgttttgcccctctgatgacttcttctaggattgggttgttttggactgtatacttaaggcaatatctataggatagaaaatggtgaagaggaggcaatgtcaatacagagctgagttatcaggacattgccaaaggaagtgtgtaatttagggacccgtgcagggctacaagcatccagtgatcctttgtctaggcaaagcttaacctcatggctctggtgaactcctagttatttgttggctcacgagacccacctcttccactcttctgagcaaaaataaagcaacttccttcccccactcagaaatgattgtgtatctgctttaaaaatggatttcaggggagttacaaatatgcagtgatttcagactacttaaataaaaaaccaaaaataaatgtctagagcagtaataatcaaggaaattttcttgttcaagaaatgcttgttctctggatgccctctttgtccctagtccttggctgcaaggagggcctcccagggacagagacattctgaatggggaacattttagatataaatgggattttttttttcaaggaaaaggtgtaaggtagctctgtagagacttgaagataaataaacaggaagtgggtcctggcagacagagaccaggccagaatctggtctccagaaggtagtcttcaaggcttatcaaagtcaggactgtccagagggtggctgcattcagcagaggctgaatcacgggacaggcctgatttaggaggagcttctttttgaaatcgcgttatcatgtactggctgacttatctttctttgtcttccctttcatggttcttttttctcattctgccggtccccctctctctttcagcactaatgtttgtttgcattttcacatgtgttctcaacccagtggtattgtttgggtgtggatggagatgggaacatggtggagcttcctttctagacccttgaattgaccccaacccagccaagttccttctggaacatctcctgccattctgtgccagcctcaggggctgaatgtcttcctgacactcaagagaaaggccctgacagtggatggagcactacagggcagggattagatgagctagggtctgagcgacaccagcccttgaccacaggcctgacttaggatgtgaatcaggcaccaggtgtaacaagcaaccagtatggaggatgctcaggcctctcaggattgccctccttctcagactctgatgcgctagaacaaggaagggctgccctgctgggatggactttggtggggtggaagcccctgaactctcaaacataggtcctgcattttcttgttctgtgtacagagaggcaagtaggaatttcagaacgtattttgtttgcataaaaattgctgcattttcacgtaacctgactgtaggttgcaaccatctagtagttcagagttctgagttattttctttttgctttgtattgtgtgtgtgtagggggacagaggacccttccttccttccttccatctatctttctttcttcttccgtttgtttttttctgttttgactaatcatataaccaagctgtaaggaaccacaactaggggagaccagagcacccgtgctctggcctggagggccgccatatccatcttcctatgggtgattgggtgatgatggtgatacatgtagttttcttcataaccagcagaggactttttgctctaatttcattttattctgctttgttctcaccaacatcatattttgaggatcttttgcagtccctaaagaataaatgctcagcagaagattctaatttgaggaaactttaaaaaatgttttatcttatccaagtagctctaacaatccttgtggaggtattgggaaatgtttcaattagcatagcactgacagcctgaaaagaattacaatttgcagtctcccactctttctgccctcccgctggcattctgtaggcatatttcttaaaagggtgaggtaaaacagaatctgcattaataatactattagccaatgttaattgagtgctcactatgtgttggggagtatctaagtgttttaataatatctcacctatcattcagcctcatgacattaacactttaataacagccctatggtgtaggagttactattatccctattttacagacgaggaaactgaggtgtggagagtttacatgctttgatgaaggtggcacagctaggaagctttgaagccaggctatgaagcactggtaacaatcacgttaataagatacatagtactatcattggtctgttactgtgtgaacattttatgtaaacagtaacatttactcctcacacctctctgaaatagacaattattcccggttaaggcctagagagggggaacttacctgaaatcacataagcagccagtggcagaccagtatgctagctcaggactccattccttgactttgtacaccaagcttcccaggactattcaggaccctttggattcgtgttcctctcattcctctgtggcacttaatgtcttccctattcattttggcttagaccctgttttccagtgttatctctctgtcttctttcttcccttgggctgcagagcacctcttggaaagcaagaatcatgccttgtcatggcatgagcactgtgtgctggcagatgcttactcaaacaaaatgaatgaaagccaaacaacgatatcccccagctatattcagtttatctccttaccacatttctctatcattttattttaaatttcaactacggtcaatcagaaatgtattgagtggttctttcaagaaggggactgtattagtccgttaggcagtgctgacaaagacatacccaagactgggtaatttatagagaaaaagaggtttaatggactcacagttccacgtggctggggaggcctcacaatcatggcagaaggcaaaaggcacattttacacggcggcagatgagacaatgaaagccaagagaaaggggaaaccccttataaaatcatcagatcctgtgagactgattcactaccaccagagcagtatggggaaaactgccccgatgattcaattatctcccactgggtccctcccacaacacataggaattatgggagctacaattcaagatgagatttgggtggggacacagccagaccatatcaggcactgagctgggtgtttgggtgtggaaaggcgtacggcctggacttggcttttgggggcttgggtccaactggaaaagctggctgtggacaaagaggtcatggaccttgtgaggcagagtacaccatgaaaacgtgggcgatcacgctgtccgtggctggagcagagcccctctgttggagtgaaggctttctgtgggttggcaggactgcactagctcctagctcctgggtggaagtgagcagacatcagtgaggaatcagagagccccagaagccccaatgcatgggtgtcattcacttagagaccttcactaagcatcaacacacctgtcacttggcagtttcaatgaatgctttccacatttcagagattccccaattaaggcagcagctagtaaagtgcattctttcctggggatcacttggcaggtgggtatcagaggctgaacgctgcattccatcgcgcctctagaccataggcttagcgattggatgatgttgtttttcccgggtgagttaggaattgaaggtctgagaaatgtatgtaattttggttgagttttgatatgggactccatggaatcacacagactaaatgtggttttgatacttgagaggacgcgggagtcaccctctagatgaaggaagctgcggcactttgctcatgtcatgtaaggtgcttggagtttcatttgataagcagatggattctctggtagtccctccagctactccacagcctcttaagggcggaactaggcctcctccaggcttgcctcctaatccgcagcacatggcttggcctgtggaatttgccaataaaatccgaaggactctcatcctgcctttcctttcactcactctgttgtggacacccataaacacagcttattccagctgcaaagcgtttcctcttgtggtccgccctgctgggaacacccctaccctgatcttcccatggacagctgtttcttgtcattttggcctaagctcacagagaattccctccctgatgcctttcctgataccaaatcaaaataatcctctaccactaccaccagtcttactctggcatatcatcctggagtttttcttcagaacaatcatctccatctgaagttatcccattcattatttggttatctgtgtatgggttgtcttccccaaagggactaaaaattccttgagaagagatatgctctgtcttgttagcagtgtctggcggatagaaggtgttcaataaatttgttgcatgaatgactgcaggaatgaaggcctgagatcacgtcttcttctccttggagtctgtgtcctttttcctgaattgtcttgtgttgtccttgccttgggcatgttacttcctcagtgtcatttctgactgggcagctgtgtgaggctgctcctgtggaggtgctggagacaggttacaaatacatagaagtcattgaacttgtgtctgtctgtccaggccacagatgaggtgtgttggttgtccattatttcatatttgcacccatgacacttaccttccttctgctgggtcacctccccacccagtccttaagtctttgaaggaacaatgatagtcaactccagggaaattagcattttcaaggtaaggagggacacagaaaagcactctgctcatcctttctctctgtttgtggagtctgctggcagtggttgtggtggtataactattgatccgttgtttatgagttcacccgttcagaatagcaatgctactcaggaggcctgtgctgctcccactgccctgccccctctcaggacccgccactgggcactcacctctgggcttgccaggcatccggctggtgtcctgtggctctgaggagcaggcacagatgggaccaaggagggaggctcctggaagcacattcagctgttgaggagccaaaaactaaaatgggaaaactaaaaactcaaccaaacatagggcagaaggggtaggagtatgccagttgtcactgaaagctagaggaggctacagggggccagctcagttctctaacacccctcatctaaaccgtaagtgctttgcagaaaaacgtctcctttctccctcttttaaatgcattgcgttcttgaatttgaaaggtttgcagagagctgggaggtcaaccacctggttttacagatagtggaagtagtgataatcagtcttgcgtaaggaggccttccagaagggtgagagggccggcagccagtacactttccatccccaggctgtgagccctcacttggggctatgcatgctgaaggaaaggccatgtttccctaagtgcaaaagcatcctcctgaccatgaatgctttcaatgcatttagctgacatttatcaccgtattctctcctgactgctggtttagtccgtaccacaccttgcgttcttatgctttgactctcattccatgtgggacagctgtttgctgtgggtcaggtcctgtgctgagcagtttaccagaagaacctcatttaatcctcacagatactccatcaggtggacacaatgattactctgattttacagagcaggaaaccaaagcgctgagaggcacagtgaaggtattttcccagctcacatactcaggtgggtgctgagcctgggactcaagatgggtggtgtctgactcctaggcaatccccctcggttccatagtactggtcttgttctgtcccttgtattcttcattgccaagttcctctcccactagagacccagtgagtttggttgtccctccttgtcgtggtgcacaggaatcccctctcctgaagcatgaggaacagggcctgggagtgtttaaggtttcatgtcatccatggcgtggagacacagggacccaaccgacctctagaggtcccttctactcacagaatcctgcaatttctatagtttgttcagaggaagactcttattccaggttcttccattgatctttggctttaggtatcagcaatcttggactttctcacctggagttagtaataccatgaacatttccacgtacttctctggaatgcagtattgaaccagtcaaggcagacaccaattctaggaggattctacaggccagtcagtggatctggatgccatagcaccaggggaacaagagggaccagctccaaaacgcttcctttttttttttttaaattagtaataggcatctctcctggggaatcttgtaaaaaaagataattaatggtaatggcatgtttgttctcttaggttgaaagtctccactgatgagtaaaatagaacatcgtccttgtgttatttaaggtcattttgcttcctcaggagtaagttgatgggttcccactgtgtaatagataactaatactaaataaataataagcaatactaccaacatcattatagatggtcaaatatttttaggaaaccaaggacttattgggtttaggatgcaatttcaaattgcatgtgtgagctgaagggagaaggaagcaacggggaagtttactaggagtacaatcattggagacaaacatctccaacacacaagaccttactgactcgtaggtaccaggaggggtaggctagaaagaagatagagtgggagacaggaatctacaaactctggctcaggcagtttgtttgattgcaggcaaaatttgtaatctctccaccctgcatttaaacaggaccgttattacccatctcacagtgttgttttaggttaaaatgagatgacacacacaaaacatagtatatagttataactttctttctctatatatgaatatatatgtacatatgcatgtgtgcatatatgtgtatataatatacacacatataccaattttcattataaactattgtagcttaaacactttggcagatataccatgtcttgcttctgaaagatccaattataggtggacaaatccccctttgtccacctataattgtgagtttttttgtggtgcctctcctacacatctgtttagagattcttcagtttcaaatcatttcttgagatgtttgatttctgagagggagcgagaagaaagatatttctttgtttttcgtaaaaagattgttgcatagcaggttgtgacagttcatggctctgaagatgcatttcccatcagaaaaattcatccagaaggttctgtggagcaggttttctgtgaattcatgcatagatttcggagtgccagaccccttttccttggagaaatgatttttccatgataattccagtggagtcaaatggtaaaaaacagggtctgggataacatgtgttggggaagaggtagtttaagactctcgcagctgtaatgttctctaattgtaagtcttctcttcattcatatctcctgatgattgggaggcaggctcagggcttgagtggtgatggtgaaaatagagaaggaggcttctttgcatttgggaattttacttttggtcaggtctagggcaacaccagtgcatctggcattagaaactgatctcagcattcactgatgggatcacaggaagagtcctgtccattttaacccaatgtcaaagggcttaaattagtttaaatgtagtgaactatgaatagccgtcttgatctttcatgatctgtttttcttaaatctcatttattcacattgttgaattatttggttttatttgggtgtatttgggcaacttgctgtcctatcagtgtgaaatgttttggcttagaaagcttttggggggttagatttgtcttataaaatgaacgtatgaactaatcttacaatcttgctgatggatttcttaaaataatagaatttttaatgaaaacagcatcaaccaacagactgatggaaaattaaaaaaactaaaattgaccttcaaacaagctttgttgggttcatggagtcaaaggaagatgtatctgtgtgaaaatagtttcttaatcttctgtgctttcaaacggcctctaatgtgctggatgagtgaaaaaaatgctctcacattcagaataatcatctttggacaaatttacctgtcaggagggctcaatccaaaattctaacccttcagaagctataagtaagaaaaagaacgcatgcgaattatttttaatttagtgcagtttttatacagaaaagctggaaatagcaatgctgtggtttacgggttgaattttgtcccatctccccaccataaaaaaattatattgatgtcctaacctccaatagcttacaatgtgactttatttgtaaatatggttgctacagatgtaattagctaaggtgaggtcatactagagtagagtgtgcctctaaaccaatataactggtgttctggtaaaaagatgcctatgtggagacacagaagacacgcagagagtgacaacaaaggcagaggctgtagtgatgcacccacaagccaagaaatgccacagattgccagcaagcagccaggaattaggaagaggcaatgagggaaacttccctacaagtttcaaagggagtatggccctgccaacacggtgatctccatgatttcagacttctgggctctagaactgtgagacaacacatttccactgttttcagcccccagttttgatactatattatgacagcagtaggatactggaacatttgcatattaaaaaaataattttgttaaataatagtaacaatcttgcaaaggatcgtagataggcctggttagatcacccagttcccagctgtgacacgagccactgcagtccacagaggaagtgccagagtccagaatgcttctgggtctcagtcgtgagcccagcctctccattacaaatcctaaagaagccaatcagggtggaaatgcttgcccttttattcctcagaggccatcagcacaaaccctattgtatcttctcagttatctcgaccacctgagaagtcacagacccccaaccccagggccatgcatcgttttctagattcatatcccaacatccaacagcccaacccagttacaaacctcttcctcatcctccaaacctttttactctctggacttaatgatctgtcaccagcaacatttttacatctccagtctctgctttgaatgttccccccttattattatttttttcttttttgctttagttgaaactcggctgttccctggattatttccactcctggagtcctcaaaagtggctgtttttctcccacaccttgcttaccctgaggcctgaaagttggataaacgtcctccttgctactcattatggctgctggacatttctttttcacctttctcgacatatccagttagggtgcagcaaatgccacttggctctgttgccctctgccccttccttgccgtgatcatctgccatcagttctgaccacgcttcttcactctggtcctccagaccgcacatcctgctgctcatctacagagccttttaatgatgacattcaaactgggtcctcccagccagtacccttgacgcaaggcccactggaccacggccagctactccatcctgcccttccctcagtctttctgatcttaggaactgcaaacctagtacatcctttatttttttcattctctcctgtgcttcatctaattcaccactaaattctgtttgtcttttcttttaagagttatcctgaatcagaccactttttaccatctcaagcactacctccgtgggcaaagccaccaccgtctctcctcggctcttctggtggcatcttgcctggtctccttgtttctactcctgttcccctggagtttattatctgcctggcagccccagctaccatttcacaagaattacctgactctgttcaaaacctacagtggcttctggctaaacttagaatgaaatgcaaacacctccatggagtagaggctttttaatcgcctggtgcctatgtaagcctcataccactgcccacgtcgctgctgcctcgctcgtgggaatgcagaacgctgaacttctctgctgttcctggaacttactaagactgttcttgacttaagaaatgttcttccctctctcaggatctgctataaacttatgggcctagaccttcgttgaattcatgcatctactccagtaccccgtttaaaaaaaaaaggctttacagatcatcctgtttgaaatagccatgtcctcagcccccatctttctatccctctacctagctttaactttcttcatggcctgtaacacctagagaagtctgttatttatgtatgtcttctgttatttatgtatttctcatttattgctactccccctaaaatgcaaggtccaccaagctgctgagtttattgctctcatttatagtgattacattactgcctgggacatgggatctattacaggatatttgttgagtgaatgaaacgtttgttaggaataatagtaagctattaatagtgaaattatttatcttttactagaaagaggaaactcaggtctgtctctgtattggcatgggattgggtgttattaaacagagttcagatagggtgtgcgtgagctggcgtgtttgttttctaggtcagagagtggaatgagacattgaggaggaaattgtcaggcaatgtgacacacttcataaaatctacacatgtggaatctaaagggcctttaaatatccacttttgcaaggggttttatggaaaatctaataaacactggagaataaggattattctgctcaaggcctacaaactttgggggaagggaaggaagtgaagtggcagctagaaatcaggctgtgagcctgaagtttcacgcgtcattcaatgtccaatctttcatgttaacctttctttattaagagaattgtaccttagcgctctagaggataatgattaagtgcagggtctggagcccgaccctcctcccatccccagtttcaaatgctggctcagccactgggtatatgacctttggcacatggattagccttgctgtgcctcagtttatcatcatttgaagggactaataataggggttccgggccagtgtgaagcgtgaagtactcagaacagtgcctggcactctgctcatacttggtgttagccttacatagctgaggaaggacctggcctgcagtgggcccgtggtgggcagagggcagggtgtacctctcgtgaccctggagctatgtgtggaaatgcacagtgcagggcacggagctgggggccgtggctgacactggtgcacactctacagttacacagacatctggtggtggggtggtttttgaaaagtatcaacgcagttcattgcttttggcatgtgacttgtggtctcggggccaaggtgacctggcttttagtcctggctctgtcccaacgcatcatgtggggctactaagaaaatgagcattcccaggcttcaggttcactctgtgaagtgagaatactgctctgtttcgttcttgagttttgaggaagagattactagctgctcaaatcatatataagtttttttatttttcccctgagcacaaactcagctgcctttcccagcctcttttgaatttagaggtgaccatgtgacagctctacccaaaggaatgtgagccgaagctctgtgtaggttggcccagaaaaacatcccctgtgaaattctttatgttctttcctttctccttagaccatctggatgttgatgtccaaaattaccttggaaacctgtgtcctgtttggcgagctccatcggccaaattcttgaatgacagcacagagcagggctcacacccccacccaccagctggccaggaaccttgttaaattattacctaaagaaaaaacaaacttgtattcaggcttctgagagttcagagatgatttgttacaatagctagcattatcctatctaattcaatactcaaccattataatttatattttctgatttcagctgcatagaaatatacagatgtagtttctgaatccagacctaagcacttattacaatttcttggcaagacttttggtgatttttgcatgtgtctgaaagtgagaaccatggccttttcaaacggaagtctcaaatgtttgattttcagttgcttgactgtttacatctgtggtccaagtaacatgtctgctttattctacaggaatgtgaaaaccagtgacaaggaaaagttttaccttgaggcaaatgagcacatatccataatggacttaactcaagacatgctataattggtgaaaatacctcttagatgataaattactcattaatggctggaggtcacttatttagtttaaccttttgtgccagaagtattctaatatccagtgttttaattgacacacactaaagagatagataggatgatttgtaggcttgttctcaaaaatgttaaagagaaagaagagaaaaccactattagagttccttttttttttctttcttttctctttttttttttttttttttttaacagggtctcgctctgtcacccaggctggagtgcagagatgcagtctcagctcactgcagcctcaacctccctgggctcaggttaccttcccacctcagcctcccaaatagctgggaccacaggtacatgccaccatgcccagctgatttttgtatttttttgagagacagggtttcaccatgttgccgaggaggtctcagactcctgggatcaagtgatctgcctgccttggcctgccaaagtgctgggattacagatagatgtaagccaccacacccagccagagttccaagccttgaagagaaaccaggtggtggagaaatcgtgtatggatttgggtaaaggagaaaggaagctgtggaaaggggaagaggctgagccagagttgtgggtaggagacgtacaaggaatggaggcaatgcagagacacggggcaagattcaggtgcctcgattccaccttttgtaattcaggggtcagggatcttgtcttacttttgttgttgctttggtatgctgcacagtgcctggcacataataggagctgaatgtatccttggagaatagatgcatgtgttttgctgtgttgcttcagtagtgcctactgtacatctcctatgagccaggagctgttctaggtgctaagttcctctcttgcagagtgatgtttagtgaaggagatgagggttgcaacttgtatggattagaaaaaaaaggcatcttctcctagcatgcaacttgcacagaccaagtaggagtaggcattcctcgctgacgatgttgttcactagagtccctggctgagtaaacagagtgccagctgcattattttgttaccttcttcagcccttgagcagcgcacaagctgcacaactgtacttagcaggaaccagctgtcggaaaacaaataagtaaacaaacaaacaacgcatcacatggtggaaagtattggggcaggaagtaaactgtaggttaggggacagagtaacctggtgtgcagggaggggtaggggcttgcacgatggtcaaggtggtgaactgtggggagagccatgcagggaatagcgtgctgggcagagtatcggcaagtggaatgacctagtcaaagacgagcaaggcaaggaggaggaagggtcaaagctgaataaggggcaggcagtcagcaaagggatctggggggtcctcggtgtctgtaagtgctctttccatgtcaagattaagctgtgaatgatgataggagcacagctctcaggagatgggaattaaataaaaatcccacataagcaagtagccccaacacctgtgtggattcacttgctgcgcacagaggcctggtagtttccgtgtggactttgtggatttgtggcaacccatatttgatgtgtcacccctgcagcacacacatccagccgcgaggatccggggttttctaactgaaatgtcatccttcttgggtccactcttgtcattttcacttatcacatctgcaagttataaacgtttaaaatgtgcatgatatccaatttgacgttttacctgttgccatttccaagatattacattgtgaaattaagctggcattttacgatcatgtatggatgtgtgtgtaagtataagtaggcacgtatttggaattaatggactcatagaaatcagagatggattaggcctaatgagctgttcagaagaattatttagcacatatttcatctctctattcagtaatcaaacctacacagtgtgtatgctaaggaagtgagatttttgcctttttaaaaaatttcttggattatctccatttgtggctgaaaatttaacattgcatcctagggcattttgcaccaactttattaagcattcagtctgacatttccctgcacctggggttgcctttgttatttaaaaagtagttgctttcctagttaccattaatatataattagtagttggtgctgggctccaagcaccacaccaggatcctggcctggccttggagccattgtcaaaaacaaaatcttgcccaagtctctaggaagacttggagagttaagcctagatgggaagtgtatatattttgtttgaatttttatccacagtaaatggatgcagctttgtcttttcacctaaggcctatggtcaccttcctctggaagccacatgcacttgactgttgccactttggcttctgctgattcctttaagcacacagtttcaacagactttcaaaatactattcacaacatggggttccgtacttactaacaggaagaaggaaagcaaatgtgggatacttgatagtgtagaaggacacttgatacccagagaaggatttcattgacactgttacagagacataaaatcacagagccctgtggtagcatcagagatggggtcacacatagtcagctcccaatagccaggagtctaccctatgaattttctttacagcatggctagatacagtatatacatatttatcctaaacatatatactcaacttataagtctgcatgaaacatgtgaattgagaatatgttctatattgggaacaaaggattctggtgttgggaaaaacttaagctgggacttaatttgagctgtaaaattattaacctaatctctctgagcctttgttttttttttaatctgtgaaatggggctaaattatatcttaatacctacctgacagagttgttacaaaaatcatcaccataatattaataataacaacagaaaccaacatcggtagaagcacttaatgagaacctatgcttacatgataaatgctttacaagggttacccaatggtctaccctgtgaattttctttacagcatggctagatacttataatacttatcgtaagtatttttaataattacattaagacaagatataaattcttaaggattgtacctggcatatatgaggcactaaacaagttatttcatattgttaatacattccattagcaaaaacaagttaaaatgcttaggcatgtatagaggatgctggaagacgttctggctgttgccagaatctccagacacaaaccttttctgtggtctcccgtctgtgttttgtcccactacaaactctgtttgttttctgtggtctcccgtctgtgttttgtcccactgcaaactgtttgttttctatggtctcccgtctgtgttttgtcccactgcaaactctgtttgttttctgtggtctcccgtctgtgttttgtcccactgcaaactctgtttgttttctgtggtctcccgtctgtgttttgtcccactgcaaactctgtttgttttctgtggtctcccgtctgtgttttgtcccactgcaaactgtttgttttctgtggtctcccgtctgtgttttgtcccactgcaaactctgaactcaccattccccatggcttgcttagcctggttgcattttccacctccttctccctgactctttctcaaccacccacccctcagcaagtcaggtgaaaatcctgcaaacagcatcattctcaccctttccttcattttttcaatcagtacaaacctcttgttttctcatgttcccatagtgtgtagtttagaatcattcaattatttcttcaggaaagaaagtgttccacatctgctgagtgcctaacaccgttctagaccctgagactcgagaagacaatgaagaagtaagtggccgcacaatgcaatgtccggtagtgctgaatgctctgaagaggagagcggcagccagggagggaaaggaggaagtgtgcgagtttagactccctggttaggggaaggccctcctacgcaggccttgagtgagatctgatgaatgagggcgtgagcctgcccacatttaggagagaggtttccgaggcagatacaaaggtgctgaggagggatcatccttggcctgaaccaacgggggggcacatgtgggcggggcctggtccaagccacaggccttggtgatggctttggattttattcttcgtcttatgggaagcccctggagcagtttgacagtttgagctgctgcatgttagcagttttttttttttaattttttatttttctgtaacttattgcccttataaaaactttccgttttttttgtatacggcaaaggctgtattttctttgcgtttttgtgttagagacaggacacagccctcgtgtagaacctcctctgcactcccacaattccctgtgccacgtccattgttttaagcacttaactgtgatacaggacaaagctcatttctgcagacttcctctttttttttggttcacactgattcacaaagtaagacgccacttccaatggtcatatcgtgaaggtttcctcgaaggatcgtgaaattccacgaagtccgcttgctttcctgggtgaataaacaccaggccgctccctggactttccttgtcgtttgtgatcaaaggctcagctacctcgtgctcatggtcctgcgatggctgaaatccgtgaaatgtccagaaagaatgatttgtcatgaatgcatcagcaaagaggctataagcttctattcttattttcttatctacttttaaacactttttcattgctttaaaaaagtatataattactgttcatttggtgttgatgttattgccttgctcggtgttgggggttgtttaaccattcagtgtacaccagtgactttttggtctgtatttcccaacaattacactgagttgcagagaaaatattaattaaacatacttctattttaaaaggcaataataatatataattcccattagaaatgcatttgaaacttttctattaactctttactgttgtcaccaaagccttcccttctagacagtggaagtgagtgggacaggtggccatatatggtttgagcaggtgggcagaggaagaatgcagggtacttgttgccctctggttggtcctccttcctccatgcttattttcaaccttctggcccctcacactgggcccaactcatgccctgcactcggcaaatgtttaatgaaatgcttcctcgaggagcacaatattttatgtgtacagggagccgaatgcatattattgcatagtattttccttttgttatgaaatattttatataccagcatgtgcataatatatctatgtataaaaacataatacattgatcacctgtgttctcttggcacaatctaagaaatagaaccttctattacctgtgaaagtttctgcactcccacctattctctaccctttcttgcttgaggagatcaccactggcctgaatttttgtttatttcctcctttcctttagacttttaccaaatatataattattctcaaacaacatattgtctagtttttcttgttcttccctccaaatagaaagaaattttatgtattctccttcaaatgtttttcatttgatgttatgcattttctaataatttaaaattaacgtagtcctgaatgtgaacaaaggcagagctctaactcagtcatttcaggtaattaactggtctacaacccatcagtcagaagtgctttgatgctctttgactgtgtgtgtgtgagtacacaaaacacctgctaaaatattaaataaaagcagaaaggctttgacatcaacatagtagtgttcataacgtttctgcgtagtggaattgcgagtgacatagattttttgtgttttctctaattattaaattaaaaaattaaattttggattttcataaccagataggattagtgtcataaaaataggttcctaggccaggtgtggtggcttacatctgtaatcccagcactttgggaggctgaggtgggtggatcacttgagcctagagttcaggaccagcctgggcaaaaccctgtctctatacaaaatacaaaaattagctgggcatggtggtatgcgcttgtggtcccagctactggagaggctgagacaggaagattgcttgagcccaggaggtcgaggctacagtgaaccgagatggcgccactgcagtccagcctgggctacagaacaagacagtgcctcaaaaaaaaaaataataataataatatatacgtgtgtgtgtgtgtgtgtgtgtgtgtgtgtgtgtgtatgtgtgtgtgttccttttgaccacacactgatttgtttaggccatggggctttttgcacacacatccccatgtgtagggcgttgcactaggtgatgtttgggctacagaaataaataagacacagttcctgtcttccacatgcccatgacctggctaggaatggggagcttcagaagcaagacctcaggaggtgactgagaaggagccactgctggtctagaaggccaccttgtaatctggcatgtggtggggggtggtgcaggagcacagaagggacactggcggttttggggagaagtggtggcgggaaggggcctgcatctatgagggccagggcggctgtgccatggcagccaaaatacaatagggaactggagcagcaagaggccaccagctacagctgacgcatttctggcgggagagaggacctcagagttgtgcgtggccttcacgagtctttcccaccacggcggtgcctcgatctgtttccagctaagcccagagcagccagggctgtcagaaccaggaagactgataagcgtgtctctggatggcaacgtcaggttcaattttattcagcaagtatccactccatgccaaccatgtgccaggcactgttctaggctttgtggaatccagtagttgtcaaacataataaaatccctgtcctcacagcacttccctcctggtggaatgagacagtgaacaaaatacatacaaaacatagaataaattaactggtgacacatgctgtggagtggggcgggtcgatgggaaaggaagatgaagcctatgattccaagtaggatgtctagaacaagaataatcccttgcttatcggtatagtttaaattgtcaacaaaaacatgcattattttgacataagaagaaacatcaggaaaaaggtaaagaccacagtttattgcaatatatgcttttttcaacatttgaggaaaagagattgtacatgctgtattggaaatacgttttagtgtctaaaacggtgcagagccagaatgttgatcttcatttatcaccccaattcttcctggatcttaattgccccttcagaaagaataaaaaatggaagcacttcatccagcttctgcacagaaagcctgtctctgatcagcagacaaggaataggagatgatgctgatggtggtgatgatttataccttaatgagcaggcgttggtcatcagtatgtgctgaaaagggattcgctccctgcccacaggggactttccagatgctgctgagctgggcctgagctgcaggaggtacagaggctggttggaacagccgatccttggggcatcttttaggccaagggcctttggaaccgaattgagtggagcaatttaactgcccgggacacacaaagcctcttaaaagcaatggccggtgaataagccagaagccataaatagataaagtaacaagcaaataatgggattaataaatagacaggggagcagagccagggctgtgagctgagcgccactagatcaagaaatgtcagcttttctctcagcttttcctccacagcgccaactgtcagtaatttaactaacattttgtaaataaatgtggcactcggacagctgtcaacgtgcctgctatgaacactccttttgtcactaaaagctggcagtgacgctgtttctcctgcaagtgcagccagcactgccaattggctcctggtcctgggactgtcagggagtgcgtggggccctggggcagggaggtgggtgcctgccctagagacctcactcccctacacccgcaggcatcacctgggctcagctctttctggtgcacttggccggtttgtaaggtgcttccatcaaaaatgagactattgttttccaaacaccttgtgtttcagctgggagttccatgtgcctgaccatctagtttccccgccaaggatttgctctttctaaataagacattcatttatctaggttaaaggtacgaaacgcactgttttccactctagctgctgggtgattatttaaggttatgcagtcagtttccttgtgctgtggtttgctcctgaacttgaaactaatggctctggactgtgccttaggtctcccaggtttaatcacaaagttttattaagttagtgctttagtgtcctcttcctggaaagactctatctcaaagcttcttaacctatacccaagcagaataaggagaggaagaatctgtcttaatatcaaagtcccgtgggcgatgaatttgggttattgaaatagatgaaatctagcttggtgaggaaaagcgtgaactgggtaattaagtagtcagaaatatatttaataataatataaattctagtgggcatttactgaactctttttttctggggggggatgttgttttacaaagtgccctacatattacctcctttaacactcagagccccgtgaccatcccaattttaaaaatgagggtctgagatgcagagacgtggaggagtctttatgaccagcgtgtggctgaatggggatttgatcccagacagtttaggccctttgatcccaaggtcctgtgttctaaacaacagcactggtcttttttatgtatagttaccatgtgcacggggtatacaattactgatttttaagaagcaagaacacaataaaatgaactccatacataaatgaaggaagcatctttgacctttttttcctggtgaatgagaaggctctttattgtattgtggtaacccattgagaacgttattccctagagcgtatcacagagtaatatatggagaatacaaataaatgattaagtgaatgggctctgcagtcagctgagaagtttacttagcttcagaggcagaatagtagaagtaattaataggaactaccttgttgggatgttttgaggattaattataatcatataaagtctttacagtgcctgacacagggtaaatattcattcattcattcattcattgaaatttttattatgtgcatgtgatgtatcatggattctgcagtgaatgagagagacatgatgtattcttggagcttatggtcttgtgagaggagatagtaacaaacaaggtaacatatacaaacatcccaggtaggggaaagtgctgtgacggaggctgcctgggtggctggtgggctagtggatgtctctctgagaggaagtgacatttgagctgagatgtcaatggagagaaggagctggcccagcaaggatctgagagcaggacaccgcagggagcaagtgtccggtgctggagggagagaagagagacccctgtgtgtgcagcagcatagacaatggggagaggtggagcagacagacctgcagggtctgtaagccaggccacaggtagggatctcttttcattgtgcaagaggaggtcatcagagtgtttccaatggagcagtgacatgctccgagcctctgggtgacaacaggacgctgctgcctggcctcttggagactggcttataagcctcagaagtggacactgcagtattcaggtgagggatagtggaagatttggcaatgatggaggcagtaacaattgagagatagtcacagataggtttgctggtgaagcagactaagctgatggggttgataagttaatatggagggtgttactgactgcagtgcttatattctcggctaccttaaagtaacagagtaacggtggttttgttgtattagtgttattggggtatttacataatgaactatttacagcttgagaagtactcagagatttctttgccacattactactttgaattaaacatggacaacctatttgggaaagcatcactagccacctgccctacttaacactgattcagaatgtcgggctttttgtttttacttccttttcctacttcacttatgagatcgggattgatttcttgtgtttattagtcataaatatttgtcctaaaaaccagttttgggccacttccatgtccaaagttccctggtggagttatgttggaattggagggttacatgcatgagtgtgcacgcatgtgtgctgaccacagataattagggttaagagaagggtgtcatgaggataggtgggggagggaaggggagggttccctggcctgttttatcagatttcctctgcagctctccttcttactgcaagggccaggtacaatttatgttgcctgatttcctcatccatagaatgatatatttttaattaggacctctttcactagtctccttacctgtagaattttagatcaaaattacagaagaatctgtcctaggttcacaccctgtctcatgtagaacaaagaacaagaacaggcagaggaagacagtggcaaatctcactttttaataaaatagtggcattcaccatcattaatactgatactttgttcttagcttaaatcagcattaaagtaccagcattgtaattttgctcagttattgcaataactaagagtgataaaaagaggggaatcatggaaattttatatatatatgcataaaaatggattcttaaatatctcatcaactcctaagaatatcaatataaaaattggtgttgagagtgatggtcgagagacagcaacattttaaaacatgcaaaatcacattcagcattctcagtctctcaaggtattcaagtgagccatatgttttaagcaacttgtcattaacgttggttaaaattaaaataataagtttgaacatacaggattaaacttcagtttatcttggaattcatttctatcctatattgcattcctctatataataccagaagatggaggtattactgtaagacacatgtcttttgtccgtcctaaattttgagagccttctgtggaagtgctgttttctcccatgcctttttatcaagccttgggcatcactaaattctgggttaccaaaccactggccaaaaggaacttgttgctgagtggtataatggacattggagactcagaaggagggtgggtaggaggtgagggttggaaaactacctaatggatacaatgtatactacttgagtgatgggtgcatgaaaatcctagacttcatcactataaaattcatctgtgtaaccaaaaacaacttgtacctccaaagctattgaaataaaaacaattttttaaaaaactacgcacatgcatacacacacaaacacacacaaacaaagggaactggtttccaagatcagccactgttctggggaaaaaattctcactatgatacgtcaatggatggaactgaggcagacacagaacttactctgtattaacagcagggttatcaatcacttactatgtatcaggcactgctccaagtgcttatgtgcatctcataacaactctaggaggtagattctgttattattctgtgacgggtgatgtaactgagaacagttaaataacatattcaagcaaactgcttagcaaagagtcaagcgcagttttctattcagtcccaaaggtaagctttatcttaggtccaaagaaaaaggtgccacccacctactattttaactctttaggtttcagctatgaaaatgtgaagaaaggaagcaggagggaaattattccctgtctgtattgtgtatcaaaaacgtctactcttttatttctgcagaaacagaagttctgcgttttcactcaggagtagagtcagcagtttatgtgtgttttcttaataccctcttagcagttaattattccttttaataaatgcaatgaaaaagaactgttattggagtcatactttagttgaattagtaatttattctagctcttaatgtttgttaatattctgtgtattgcttcttgttctattagacagatatgacagggaggtaaaacgtgagctcacacaggagttgtgtgggtggaagtctctgggcgatgcatgggccactgacaggtattggtgggtgggggtacatgttgtagagagaggcctggagatgcagcgatgccttctcattactgcaaaagtgactgaagtcgtatggacaatttcttggtcagaggtgaatgaaatagcaaagtctttcatataccacataaaaattttcatctgaaagtgacttctggaatcattaagcctcttcccatttctctagttacagactgatctaagcacaggtgtattctacacttaatgcctcggtaatctggttctgggtctaactctagcgataaattataattttttacttctagtagaaatttacatagttttccatttagaaagctggccccatgttagaattataataaagggcaggaggtatggattaatgttattttgtagggcatgttcagcaaagtgtctcaaagggcgggtaaaaaatgagattctttctttaggttgcacgtagcaagtcctctgaacttgagtgcctttttggtgagattactgagccaagcctgaaaataatgtcgtttgctatgtctggatcctaataggcatgctcttaattaatttaactattacccatcatttgttcattccttcagtcatttctctaacacgtatcgggtgcttactacgcactggacaggattgtaagtggtcagggtacacaggtcacccagaaaaggtccttgccctcatggaagtcaccttttagtgggaaaagcagatgataaacatataattacacaaggaagcttttgacgacaagggtgggaagaaaaggacaggtgatgtgatggaaagtaactggagtgtgttggtcaggaaaggactgtggagacgggaacagtggacctgagccccgggggatgggcaggaggcagccatgcacagagcctgagaggaagcacagaattctaatgagagggaaaacaagtatgaagctgtgtggctgaaaccgtcttggcaagttagggaaagaaaacggaagtcactggggctgatcacagtgctaagcatgagagcactgcaagatgaggtcacggaggtgggcagggaccggcttgtgccaggccttgctggcagggtgaagagtttgccttttctctgcgtacaatggaaaggagaagaggttttaagcaagagaatggcttggtcatgtgtatgtctttgagacaccctggctagtctatgtatgatgcaaaaggtgggtggggcagggtgacaagaaaatactgttccggagcttcctgtggctgtgcctataagaggtggtggtggtggtgtggaaggaggtgtggcagtgaataaacagagatgtagaaacagcgtgtacatatattttaaggaacactgaggacgtgatgctggaatttgtgatgagagagtggaaaaaatccaggatgacttccaagagctgactcaagcacctgttgggttatgattcttttaacccatgtagagagactggtggagtaggtgggaaggagagaaatgagggagcaagaggacccttagatacactaagtttatgatgtttgtttagcatcaagaagagtttgcagatggatttatgattgcaaagctcgggaaagagatgagacttggggatttaagtatgggagagatcagcttatatttgttcttaaaatcttgaaattgggtaaaatcaccaagataaggagaaattgtagctagagaggagaatggcggatcggagtcctgagcttttgcaatatttaaaggttggagggaaaaggagcagagaattggcagccaatgaggtaggaagcaacccagggagagtttgagaccaaaaaatacaagagaatgaaatattttatggagacagtgaccgattttgtggaatgctgccacaaccaggagttctggaaaaggagaagtgaaaagtatccatgggactggataagatgatagcttgaggattttggcaagagaggtttcaggagaatagtagagaagggaagaaaaaaagatggtagtaattggagaggtaaatcaagtcaaaataattggtgtgtgtgtgcatacgttcagacccacattatctagtgcatgactgcatacagatgagaaagttccatctcatctgtgcagatggagggagtatggcgctggagagcagaggtgagaggtagagtacaagcagagggctggcacacctttggtgtgaagggatttctgttgcttgttttgtaaatctttcttctcttaatactcctgattcttgcaagctgctcatctggaacaatctggttacatatttttatgaattttccaacaggacagttgagagcatgaggaatttaccaaatgaagaagtggattttcaagattcttcttttacccccttgaatgatgttatgctctgtgtacagaggggcaaattaggagagtagcaaggagggatgccaaattggagtaggagggatatgaggcagtgacagtggatgtgtgaggataatagaaagtttgatttgaggaaacctcaccgtgggctacttcattacccttaagacttttagttgtgtgttctctcttgtctaagtagttctgctctagaggttcaagctgaacccagaaggaaaagaaacctatttgaaactgtgtaaaacacctcccttcagagagcttttctcactgtttttagtctcactgaagatgatcccagtatgggatgacgattctgcagagatctggcttgtctttacattacatctctaacctggagagtcttgctggatgtttccccaggattgtggtttcttatatttactcctgatctaatgcaaagcaccacgtgcaacttatgtacagttccacgactaaataatacaatggaatcaccacaaaatattatcagctcctcccaggcctctggttgttgaggaagaaaagtgggtggtgcttgttggagataaaacaagacgttagtgggtatacattgtgagataaatacatatgtattttaaagtttactggagggtatctgtatttacttggttttccccagtgttttacagatggtgcaaagtatacaaacatgcacaatgtacatatgactgcctgtcttagcagacaataccttatagacatatagacatagtccagttaacctgagctagagactcttaccttacaaatgattgtcccaaagcgttcagtaatgttttcttattttatctctttaagcaatactaagtgacttttgggatgagactgtcttttatctgaatctaggtttatggaatatttgaatatctgataccagacatggggatccacctctctttgtgcccagccaatattcagtgcagaaggggatttgtcactgaatctggcatgttgccctaacattactacaagcctgaattttgataattatcgcaattatttaagtaaatggattaaccttgctttgacaacatagtttatgagctgatacagtgtctttaaatagcatttcttaatacgggtgcaaatgataaaatttatcaaagtaaacccctgcatgaaaggtttcctcttcgatgattctgctgactggaagagcaggtccccatggcagtgcgcatagggcacgtggaggggttaaaggggagagggaagatattctcgagggtaatgagatgacaggcacattgtacaatttctcacacatctaatttatatctacataattttaaaaatgggcagtaacttataagtctgattcaatgccacttattagctgacatttttcaatattgtgtttgtgtggctctattttctaagagcaacagagtagaaacctgttatcctatatcatttctctgagtgggaattaaaagcctggagttgcatcctgggcttctgttcccttctctgccatccctgccccagccaccacccttttggggagagttagaataccatcagcaaaagagccatggggatatggattcaaatcctgtccatagcagggtgtggccatgtgaccttgggcaagttacttaattacttagctccttacttctgtgtagtgtcttacaagtgacaaagcatttcctcatattctctgtgcttgtctgtctctcccctggaactttaagcacctggaaggcagggtgtatgtctttgatctctgtatctccagtgcagaacactgtggaacaaaaacagggtaaatgaacgatagaactttgtttgactcctaccacaagcccgtgaggtgtcaggaagattgggataaccttgtaaagcacctaacacagctcagtaaaaatggactcttgttattattgggtaacagatattattcacttggagagataaaaacaaaaccaaaacactaaataatgggcttggctctcaacccaattcttctgtttccactctacttcattgccctttagtctaggtgaggtgtagatccattctaatgggcaggtgttttctgcataatcatccatattaaagaacacacttacagttatggaacatcatctcatattatctaactcatttttctttctttgcttgcttccttttcctcttttcttctcctcccttctggagatatttattgattatccatttaatgccagagttttgttaggtgctggggatttaaaaaaatgaataaaatgaaagaagttgtcatatcacaggaagatgggcatttaaacagccagctgtaaagtaaatggaacatgatgtggcagaagcaggtaaaactgctatgcaaaagcagagagagagtggattagtagggccagctgctgtaataacaacccctaaatccctgcaaactaacacaacacatattaattcttacttgtgcaatgtccatgcatagagtggttctcctgcatgacttcttccaggggatgatttggggacttggactcccttcttcctgtgatccatattgcagtccttactttgatgcaagtgggcagaggagagtagagagtgatgtagtatcttttggggccagtcctggaagcagcacctagaactgccatgatttcccatctggaagcaagggggctgggaaaggcaccctttctctgggcctggaaggggaatgatggtggtttggtggacacataacattgtctctgcacagggaacagctatttctatatgaaaagtctgtggatccaggaagatgatgcagaaggggggccatttgtctcagctcttcaagaatgcatagagtttaggctgggtgtggtggcttatgcttgtaatcccaaaattttgggaggccgaggtggatggatcgtttgaggtcaggagtttgagaccagcctggcccacatggtgaaaccccatctctactaaaaacgcaaaaattagctgggcatggtgacacgtgtctgtaaccccagctactcgggaggctgaggcaggagaatcacttgagcctggaaggtggaggttgtggtgggccgagatctggccaccgcactccagtcgggtcaagagagtgagaccctgtctcaaaaaaaaaaaaaaatgcgtagagtttagccatgtggggctaccgcagggcattcctggcagagagactaaaagctaggcatgcaactctgggtttttggaatccagtcaaggtgttggagtcgtcaagtggaagaggcatctgcagcagcctagcatgttcactgtggccttctggcctcttctcacctcccctttccaccatctacttggtgttgagttgcttatcagtttggtttctcagtctccagtctcctgtgcttgcagaggccgcatctccactaaggaagctctcttgctaccatgccccttcccctggctggtgtggactcaatttccaggctcactcacatggaaactgcacccaagtcatcaactctgggctggtgacacaacaaagaatgggtggctagaggtcagtcccagagccggctctgctgccctgcagcacccagttgggagggcccagtaacctgtgctgcaacaaaccttcggatggttctaatgcagctagtttacgagtcaccacttttccctgtttctcttttctgagtccaccctccaggtgtctgattccatcagtctgggttggcgccctgccagagtgaaagagaccagtggggcaggtgtacaggctgtcacttctacttctccggctcgttttttcccttcactctctgagcacctaccctcagttccacctatcacttttcccagctagttggcccaagcatggataaagaattttagaaatgcaactttccttttttttgtctctctctgtaggtgccagttctgtcattagaaatgtcttgccaaattagaacacaaataagccaagaatattcttcaaaatgcagataatcaaaagcacagcactggaatctgatcatcccccacacatccatggtgacagcccgagttgctctcttagagcctggcagacattctaattccaactcacatttttctaaaaggaaaaaaaaaaatacctgttaggctgatattccttaaagaagagtctttcttagagaactttataaaagccatatttgggcgttatttgtatgtgaaaattgtgctctttctgctcataaacttttctgaaacattttttttttcttttctgtgagagcttagaaaacggctagtaatttgaagacaacctatgtgacactgatatgcttttggtagcagataaatgccactggctggtgcaaagacaatttgcttggaaaatgtgaagtgctttatatctagaaatactaggtacagagtaaaattctccatttgttaaaatcagacactgacttgcagtagtgagttatgtgctgggctttattaatccttctgctcatattgctttagacataggagacagcggcgctgattagtggtgagctcttgatgaactatatttgggaggccccagttttgcaggagggggctcaggcaggtcactgcttcatgcacaaaacatagggaacacaagcagcagtttggatgtccacagctcatctcagccttgcttccacatgaggaacaatgatatcagcatgtaatctcagcattttgcccttgaaataaaattctgcccgccattgatatccagtagctcactcctcactaattcaaaataggtcccagtggattggcatcccctccatctgaattgcaacatgcacttcatctcctcctgtttaaaatgaggatgagcatgcttagagtgtttaagagttggaagctgcttcaggggtaggtatttgtagtttcatgaattatttatttaagcaaatgtgtacagcacatttatgtgttggagtatatgcctgatcacactcaaaggggtgtcgtggaaatgtatcatgccacggcatcaccattttgacatgtgtagtgcggagaaccaaaacactgctcctgggatagaacaggattagttcagtttggaatcatttggctctcatgatgcaagactaagtaaatgcgttttatcatcttccctgttgtgtaaggataaaacccagcctggatctatttgggcttcatgcctggagttttgaactaaacacagtcccattggtgtgtagtcagatttcattgtttttggttttgttttattttcccctttcaccaagcacaaatccggaaaaaaagcagtatgtgcattaaaggtttgcggtattttccttatagggcgattcacaaaattgcataagtcaagtccaatttttagctatttgtgtaaaacaaacagaggctgtctttccctatttccttagcatctcctgtctcacgcacacacacatagcaagaggtctgctgtagcacttaacggtgcattcaggggtttaatttgaagcagtgcaggaagtgagatgcctgaactccacagcgctctcatatctgggcatacacagccttgcgtcaacctggaaccctttatcccactgggtgtggttagcagcaccttcttgacttgctggtgggcacctccttgactttttttctggtccacttgaggttaaaagttgaggcggggtgaatctagaatgagcccctaacacatgtaagcctatacccttctctgaaaatagcaaaaagtgaaatatccaaactaacaggttaaccaggttcaatatttacctaaaattgccaacatttcaaaaatcatttaagaaaataacccaaataactcatcagccagccagtatttgttaagaagaaaggacaaattgcatacttgttaatttccctgtggggtagtctcagaactgtgcagtgacctctcgctgacattcctgcacctttactgatatgctcccaaagtctcacttagaagagtgaatataattgctcactctgatggctccattcaggaatcttcaggagacacaagtattaaaatgaatagatggcgtctggcaaatctcttcctgccagcgataagcaatcttgtctattaaatgtctcccagtgcaggcggatagtatattccatgcctggtccgtagcagggtgcaggctgatggattgaatgtatctatacattgtatacagctaatgaactggggttagttacataagaggaagattgatagaacccagaagttatagccagattcagtccagaaggagaatgagaaagcgatcccggaaatctgggtaaagggggagataaatcaggtgggtagacgttataaacaggcctgggaagctgggtcatgcaggcagtgggagactcgcgggagactgggagatggggagacgtgggggaatggactgctgatgactgcttcctgcctttcctccttagcacacttgggctggacagacatatgtgctttttaaacaagaatctttctgaaacctggaagcattagtctaaaaagatgtcagacaccttctggtacccttattttagagaggagaatgcacctaaggcacatacattgccacaaggtcaaataggccatttcctgatctttgccgctctcaaaataaaaagaaaatgtaaaacatatatgcaattgttaagacaaaataaaaaggagagaaagagaaggaactgtgcctgttgctaaaagctagagttcagtgttttaagaaatagaatggaaaagtttccttgaagagaactttatctttcttctccagaggagtccacaggttgtcatggattttacattcatctctaaccctacacaatgcacacaatatgaatcttcacaaatgaaatatgttccatatattgatctgtgatttcttttctctacagatagtatatcaacaatatgctcccatgtctgtatgtataaattaaccttgtttcttttacctagaagaataatactctattttgtaaggttccataacatatttcactagttccttataaatttatgtgcatattatttctaattcttcttctctgtcaaacaggctaccatgagtatcttcatgtatacaggaaagtgcctctgaaagcaaattcttggctacagagttactaggactaatggtatacaaattaaaagcttatgaaatattgaaaattacctaatataaaggttattggaaggtacaatggaatggaatgtacatggatctgtacagacatttccagaaaagctggtgagtagtggggtgtttctaaaatgtgacatttgccacactggtagttaaaaaatgtctaatttatatatatttaattatgaagtttagcatcttttcatataggttccatgcagctggccagaaaaaggcccccttcctttgcatgatggtggtcttgacttgtttaccatgatgccttcttacattgtgttctccgtacctggtattgagggactgggtttatcttcccacctgatgctacttatcctctgcattatgtgtgagataacttctggaccgcttcaggaaccctccctgcctgtggagtcatctactctaattgtccgggagttctgcacccctgccagaccctcccctccccgggactgtcttcctgtctttatgaaatcccagcacctacagagaaccaggcacatagaaacactcagaaagtggttggtgtaagaaggaagaaaggaaggcagggaggtgggtgcagggatgatacacgctggtatgaaacattcacagtgaatagaacatctgtaagacacagggccctggggtctgtccatggaattcatttttttcaatttatttagtgccttagccctcaggggccttgtttcctcacatggaagccagtcagttacgtatatgggggtggctaacatcccagttaataacagtgatgttggcttcagtcagatctgaatgtgagtgatggtgttctctcctagggttttgtgattagtttaatttacttaagcctgaatgtttcctcctgagattagtatgaggtttagatgatacaatatattgaaagcacttgatgcagagcctaatgtaagtaagcacacaataaccattggctgctatgagtagtacttattattagtagtagtagtatgattatttttattatcaaatggtaagatggtccatgcaatgctatctttgtccataaggccattggtgcccatgatgagcaagttattgtaatagaaattaagctcaattggccgggtgcagtggctcacgcctgtaatcccagcactttgggaggccgaggtgggctgatcacgaggtcaggagatcgatactatcctggctaacacagtgaaaccccgtctctactaaaaatataaaaaaaaaattagccaggcgtggtggtgggtgcctgtagtccccgctacttgggaggctgaggcaggagaatggtgtgaacctgggaggcggagcttgcagtgagccgagatcacgccactgcactccagcctgggtgacacagtgagactccatctcaaaaaaaacaaaaaaacaaaaaaacaaaaaaaagaagtgaagcccaatcattatcacatccaaaggcttattttgggggaactgccaacacttagcccttctcatttactgaatcggtggtgctcctctggtgatagaggcttgttcacagaggggagagtgttcctcaaagctgacctgctttgcttctaggaggagtgattgcttgtcctaaaatcagtgtgtccggttcagccctttagccacagggcttttgtacttgctgttctctctgcctggaaaggccatcctcatggtatctcaagggcttcttttcttacttctttcaagatggcaacatagcagaggcgtccatgctggcaactgatataaaatggccccaccgccccagtgctaggcaatctttagcactcaatgccctgagaaatgtccatatatttttaggtttgtaaaactttattttattgtggtcagattacctaacatgagatctgccttcttaaaacattttaaagtctacaatacagtaccgttaattctaggaacattgttgtgtagctgctctgtagagtgtatcttgcataattgagactttatgcccatttgacagcaactccacgtttctccctccctccagcctccgggagacaccattctacggtgactctacgtgtttgagtatttgggatacagcgtgtaagtggaatcgtgcagtgttttcccttctgtgactgacttatttcacctagtgtgatgtcctccaggttcatccgtgtcgtcacatatggcagatttctttctcagttaagactgaattgtgtgtatattgcatactgttacatgcattagtgtatattactgcgttttctttaatcattcatctattgattgacatttaggttgtttacacatcttggctattgtgactagtggtgcaatgagcatgggcgtgctaatatgttatgtacatttattgtttacctattgatttccaattgttcctcactaaaacctaagctcataaaggtggaagctttgttttgttcactgatcctgtgtcttcagaatctagaacagcacactgacctagactctaatcccagtacctgtttctttgttcttatttactagaataaaaagcaatctcagttgagttttaggcgttgcacaaagagaaacttccagcatgattggagacatcattgtctctggcacccttggggattcggggtcttgtgttgggtccaccttgagtactggccctatacctagaacagtgacccacattcccagggtctccaaggtccatcctcctgagtcacgaaaaatgtcctgtatggccaaagtcacttgtaagcctgtttttatttgaatgtcccggcccactccagctagtgctgtcagcttttcaggtccttttcagaagtcctgggagggtagaaagctctgtgctgatgttggatggacatttcctcttccttctaatgccccaaactcctatccattcatcctattgagactctcctagctactcacacttttctcttctgacactttgcacacttactagtatttactatttataattattctgttattgttttccttaccaaaatgaaggatgcttctctgttttgtttccttccctatcttgactaccttggtgcttgaccatattcagtgaatatttcttgaacattattggtggattgactttgtttcctctccccttccacaccacatcccagtagtggtacaatgggaatcccagactttaaatctgtcttcagtgccacttgcctgggttgccctagaggcctcctgtttttcatttttcctttgccctgcaatgtatggcaggtgacccagaagggtcccagaaggatgctcctgaagtttggcccacaacaccttcctgcttttccactgcacacaggtctttgcagactaataacacgtggattcccttgcctggttttctgggcatccagcatactggcttcaacttttctttccatcttacctccactatctctgtcctcttgcttctgccaagccaggcagttcacctgcctcacctataccctggcttttctctcgtacactttgttcactcagtactctctgtctcggaagcccactcactcccctttcaccctcatccttcctttgcacgtttaggtcctacataagctgaaaaagaacagagtctggtcaaatcttgactccgcttggccaatggatggtacttctcttagcctccgtttactaaaatgttaagggggaggagataatggcacctaccttatcaggatactgtgagagttacattagatactgtatatagactgcctggcatacatgctccgtaactatagactattatttctcttcaaagcccaactcaaaaaatgaaattcttctctatgaacccttctctaatcctcccacgcatggcctctcttcttcctccacttccttctggttctcttggagttgctgagcacgttgccatgtcttagaactcatcaggaacctgttctgtcttcccctgtatccaaggtgggaggcaagttgaagtcaggaattattcttgtgttctgcacagtgccctggacattgctgttgtttggtaattgtttttttttaatggactgaatcattttgctgctgcccaggctgctttctactacaatagcctgtagccttaagcaaggatgagctattttccctttagtaatgggccagcatctaggccttgattttgagttcttagtatggtaccgtgaaaatcactagtgttgaaaggaataggatcagagggggaataaaaaggcatttgatgaggctcttagtgtaacagtatgtctcactcatctttttttttccttagcctttgaaatagacaatggccttgagccttctcggcagatggaccatgtttgtgccttagccacttaacagccattagcctaattccatcctctacagccaaattaaataataagtaaaggcctatgaaaagctggtttggaggcagtgttactgcctttcacttgacagccttctctgaagcagatgctccctctccaccctattaacctgctcctctgaataaggagctgtccacacagaagcaaagatagaggcctgcaggagagtggtctggattctggagatagggggaaaatcctgatgatgaaagtccagcttctttggaaggctgaggcgggaggatcatgaggtcaggagttcaagaccagcctgaccaatatggtgaaaccccgtttctactaaaaatacaaaaattagccaggtgtggtggtgtgtgcctgtattcccagctactcaggaggctgaggcaggagaaatgcttgaaactgggaggcacaggttgcagtgagctgagattgtgccactgtactccagcctgggtgacagagcaagactccgtctcaaaaaaaaaaaaaaaaaaaaaagcccaacgtccatccactactcccacctcataggccacagaagatgagagctttaacccaaagtcatgataatgcgatttctgctttgattggtcaaagctgctatttgttagtagatagtatatgacctataaaagttcacaacaagaaagtaataccctggtcttactcctaacaagtctgataatacattctcttttatcacacttttttttcctctgtgtccttgcttatagactcctcctcctgaaatacttccttctattccgaaatcctggatacccctcaaggacagcctaaatgtccctatcctcataaaacacatctccgattctcaatctcattctctgactcaagtacctcctcctcctctgagcacccttcacccttaatctgaacataatttctaactgtattactattttcaaacttgaattatagatgtatgcatatgacccttactaccaggatctatgttccttcagggcaggaactctatagtcatctaaatacttcctacaagtttaaacttatttgtattgtgtttgtgtgtgcacacatatatgtacatgcacgtatgtatatatttatatacatacacatatactcagtaaacattttttgcatcaatgcatacatacttatgggcattttaattttttatttacacactctctctctcagctatcccttagtggcctcagattttttctgcatgtagtcaaataggtctctgtgcttgtgaaaatgtttctatcaactgtggatacgcataacctgattgttaaggtgttactttgagagatctagacagtgtgactgcatttttttcaacttaaagactggcagaaatctaaagcattcaactcaattaattttctctaaaaaagaagaaatttattactccaacacaaagatacctattacaatggttatgctttataaataagcaaacatggatgtcaggttgggatagctctgactggtgaccaatgcattatctctatttctctcttcttgcccttgctatctatcatgataggccttgatgccccagagaacagaaaggaaaggcaccttagagacattttgctgttgttattctgatcttgtggtggcatatagacttaaagtctctgatataagaaatacacactaacttgtttgtttggtgccagttttaagaattttgaaaattcagaaggtagccattcatcatgactcttaggtagaaagcgccgtgttcaagttcctccagctgctagcaaggacaagcatggggtaggtaaggcagaccctggttggctttcaggcatcagggaaagaccggaccatctgttgccatggcaacattcattggttttacaataaacatgaacaatgaggtgctaagccttctaaaaatagaggcacgctctatttttttccatatttttataagatagtttcacgatatatcttaggactaaaattgagatctatcctcctggttacaaggggcgagtgtagtatccatagctttttgaatggcagactccaagtttgtgtgacttgagtatgcgtgtgtgtctatgtgtatacacacagttaatattgagaacagacccttgaagaccactatacctacctatggagcatgacataaagtgaaatgtagcattaaaattatattaaaatatttgggaaaaaatagacaattttaccacctgatccaaaggagggagctttttctaggcaagtaatttcactgaagtgatggctttctgtgtcagttttctttgctattactggcctgggcaacattaaatctggctgaggctcagcactggacaaaatacaaaatgatcacaggcactcaggcttctgtagagcatcaattcactttctaatgaaaaagaaggagtaaagagagtgagggaaaaaagaaattgttggcaagctaaaaagagtttaagaaatgaagaggagaaaaggtaaagtgatcagaggtgagaaaaatgaggagaagagagataaatggtttgccatgaggagaatgtagacctttaacgtgaatctgatgaaccaagccactccgtggagatggagaaagccagcctttctttccctccttagccactatttctggtaatatcaagtccatctgtaaggcaggcaaggtgaatttattgtatttaatagcttccaatttaacaagtcgaatcggagggatccccaaactctactccccatggctatatgctcacagtgctgtgatttatggtaagccctcctttttcctaaaacaaccacctgagaggatgtctcctggcacgcgatgtcctctgaaaaccagaggccagtggttttgggagccagacacaggcattgtaagtagcacaggacgcttcactcagcagacagggcaggaggcctcggtagatgtgcagaagtcggggagaggcagggctagcctgctgctctgaccagacctagtgaggcaggagggtgactgtcgctgcttggtgtccttcccatcacagcagtgaggctgcaggccaagccttcacctggacacgatcagggactctggctctctgaagggaggtggtgatctcttttctaatgcacttcactgggtccacattaggccgacaagtcaggttcctcagggctcccgatgatacagcaggaggatgtacattcatccctgtccatcagcgcctcccagggaacctgcgtgtctgattgaagtaatttcacccatagtgcacaaagtgtacactcaatcaaattttatagaatactttttttttaacgaaaacattatgtttgttgtgcaaagttttagggagcagtgataagcaaaagcaaaacagaacaattaaaaccacctgtaattccccatccacattcgtcattgttaacacagtagtgtatatgcttctgtcggtattttctacagttatgtagttatatttttcatttaaaaaaatgaattcaatcttttgttacctactcatataacttatgtatatacacatctttctgtttcattaaatattttatgttatattttattgctacacaatattctattttctaaatggaccatcatttaagtagtaatgctcagtggtgagagagttagattgtttccagtggttttgctgttgtaaatactgttcagatgaacatcctcattgtctttattcacaagcatgattacctccttaggatatattcttccagtggtattgtggcagagaatatgcaaacagcagggtttttgacacctgctgtcaaattgcccttcaggaaggtaccctgagcacctccaccctcagcctcagcctcagcccgcttggttcttcctgctgtcacccctcaccaatgctacctattatcattttgtttaggtttgctgcttgataggtggaaatgccatgcctttgttttaaactgcgttgcctggaatagtaatgagtttgaaattttccccagatgttgaagggctacttgatcttttgtccctattacctagacacatggatcctagctgggctctgggaagtggcactatggcaactgctaggccttccctctccttggagaggaattagcgagaaaatgatgcctcttcaagtgtgtttttaaaagagtttaaaatgtaaaggggaaaatgtagatggccagagagataaattataaatggaggataattatcgtagtttttaggaaaggtaaaacatcaaaagatacataaatgacaaaagaactaaatatcttaggaagccgactttcctaaggtaagaatcgtgtgctgagtatgtggcaccaagacctggaaggacccatgtccctcccaccctcccagtgccccgacctcccacctctggtgctgtgctgtgactccacagggagattttgtgccagtgcccccaccagggactcatcaccactctagcccaatgactccaaaattgccttctcctaaatataatgtccgcgctttgacttttaaaaatagcagcagaaaatgaccagggggcactctgtgatgtccaagattcctggggcaaagcagcccctggagcctgttcttaagatagctccatccttgtcttgctgaattatttacagaacttgtgagggcagaggctgagtagaggtacttcctttctgaacatgctcaggcactccctgggccaggcagggaagccagtgtctggaggatgtctgctacccggtgtcagggagtctgccattgattttctttaggacaaacctctctgcaaatgccacagatttacattagccgcactatagagacccagtcagggccaggcgcagagacgtggggaatgccacgtgctgatttcttttctgctctgggcagttgcttcttttcacttccacgtctgaatggcagggagaagctgggtgcccccacatgtgagtcagaatgtgacctctagcatttgaaagtcctagttattaaatatatgatctgagttgtccacattaaaaaggcatttgggagtgcggggatatggagaaagatgatgagcttgatgtttggattgatttattctcagtagaggtgatttcagcaggctttcccaggcaagttaggatactttagcattactctgggtatctggccagagttttcaggggtgttaaatagtgaggctcttaagaatgcaggaagcttgggtcatctcctgcgttcctagggtactgccgagactgggttcctttcatcggtgtctcggggggttgggggtgggggagctgagccacagtggagcggaactgtctgcatggacccttccctttcttccagctccggtgtttgcccacaattccactcacttaaaatttgcctttgtcttctagccaggtagcttgccaggggaaactgggtgtgagtcaatggccttcctcttcactctatggtcagcctctgtttttgtgggacagcatcagcctgaagccaggcaaaaggcccaagtcatgtagtaaaaagtgtgcagggctcaggactggaagcaaaactctccaccaaccagcttggtgctattaatcagatactgtaactgcctggaaagatgagcaaacaagctgtattcctcaggctcctattttgtgctgtctacattgtgtcctctgtgctacctcatttaatcctgttaatcatggtttagatgggggaatatcatctctaatatgcatatttagtaactgaggtttatagacctccaaggtcatgtaaactacgaggtggccatgctagaatttaaacagcagtttttatttttgtgaaagtcttgttttctttccaagatattacagctgtcttacttcacaaaattgtcctgaggaccagataattgtaacatatatgagaggtaaaagaaaaaagtctaaccaatgtttggtagtgtgattattgcttttatattctagttaatttttctgtgatgaaaaagcaagtttccaaaggccctggctttgaagggaagtaatgcaacttggcccagtctctgggtttatcccagaaagccagttcccctccaactccctcctgcaggtgcagttttcagctgggccctcagacacagtccactttgcatcccacttcttgggaaaatttttcttaatgttcactagcgctaagatcattctgaaacctctccctgcaccactgcaagactagtgcattcttaaaccctgcagcccaaccgttacctgtgatttattttattgtcatttattcccacagacaatacacataaaaataaaggtagtaagtgtaagagcattttaattgccatcccactagtcttaaatgtccactgtttttatatctccccctcctaccctagaaaatttcagaatagagaagatcaatttatcatcttatcctcgtttcctgatctcaaattggaagatggacagtttttatgttaatagagagtcgtttagagtcagggaatttttcgaaggaaagtcgagatagatggatgaataggtggttgtgtgtgtgtgtgtattatatatattaatattaatagagaggcttcctttgtggcctcatgcagaatgcttaaagatcctagaaatgttgctgtaggaatggaagcagaagaagccgcaggcttcatggttgattgcttttctgattggtgccataaaaaaaatgcattagcgagagaatgtttgatttaaagagcgcctagatgccgacaccacctctgtttgttttccttcctttagcagaaaccttgtaaaatttttatgaagtattaatggatctgagattttctccagcaaattttatgaggtgagcttaatcccacacatccgacccaatttagcagtctttagagacatagaacgtaaaaggcactcagaaagtatcctgggtgcctcagtaccaggggagtgatggggcaggggtagggtatttcctccctctcagtgctttggtagactctcaggggttgtgggagaacagagtgaagaggtaccccacccacagagaagaccgcacaggtaagccaaaacttcagatagtaaatcttaattcataacttagcactgacttcaagaacttccctatataactgtagtctttgatgagaaaatcgtgtttagggaaaacaagaaattatttgtattaacagtttctgtgctgtcaacctggaatcactggctttaatctaagaaagagacatgaacaccgtccttcctccaccccaatttgttttctgtatttgaaacaaaagagccttgaagaagataagttacatttttgtgtatgttgatgagtgcagctacgttttgtaatgtgaagtttggcctcccacaaaccaagcaacttgatgagcctcagcacactagtgagcatttagcagttcccatcacttacctgtttatgctgattctgtactactctcgcgagttcttgccctgtaatgtgtgaattccattagatttatggtgacgaaatgaaggaagagaagttttttggaagagaaataggagccttcgccaactaagaaatcactgtggcctattcaagaatggtcaagggtttgggattttaccctactttcaggcaaacaagtccacatgccactgtttcaggggtgctggcggaagaaacgagactccagggtcagagataaaagactttgttactcgtggcacagcaggcagcatgagctccatgttcgtgtcagtgctttttgttccccaggtctcaagagggtgatgtgtatggcccaagtggatgttctgtgctgaggtggtttgcaccacaaccaagtaacccctcatttagcaaactcaaatcttttgtaatgggctgcccgcagatttgcccaatcttttctcagaagagaggtgttctctttattttactggacataaaaatctgccttgtgccatggagggagacaccatttctgtcttaaagttcttcgctgtattaacatccttgaaaagatagtcatggccaggcatagttgctcacacctgtaattccagcattttgggaggccgaggtgggaggatcacttgagcctaggggcttgagaccagcctgggcaacatagagaaaccccatctttacaaaataaaataattaaaaaaaattagccaggtgtagtggtgcatgcctgtggtcccagctactagggaggttgtggtgggaggatcacttgatcccaggagttctgggctgcagtgagttgtggtcacaccactgcactccagcctgagtgacagagtgtctaaaacaatactttaccttgttttcctgcgggtgaatattctcatgagtaaaccacctcatcaaccactctgactgatcaaggttggtagcaaatccattcaatttgtctaatacagcatttaattaaagctactatcaacagggttttgtgcagcaggatgaagctgttctacagtattgacctcaacattgttccccaagatcccagacctaaccagatgaagaaatgccacagacaatcatggtccaggtgagaaacaaaagggaaagttttccttacgtttctatattaactttctcacttgtctgaggcatgaatgcaggtacaacagcatgtactagagattgcacagacctgagtaggcttgcaaagaggcagtggagggtagttgtgttatccataacaatcctggccagtgcattgaagctgatttgaattccttccagggcaagggtgttatctccttaaatacttgaggttctctgtgagcacctctgagcgtaaaagtcacagggtgttcagaaggggcaagttaaggcctacttccacacaagaagtacaagctcgagggtgttcatggtgcccctggatggaaagtcttgtttacagttgttgggaccctcccaggtaagacctccgtccatccagaatcacaacttgacattgcctccagtgtcatctcctacatgatcgttaggacttaggggcttcagttctgctagaataattgagtctaacccctgtttttgagggacttcctgccctgtatatccatgtcaccggctggatgccattcatctggcctgtggaaccatggagcagtcagtgactctaggaagggaatcggggagacaatggcagatgttgacatatgttttgtgatgatgttccaggagctggccccatcccctaatgttcatataaactgctcagttaggttaaggggaatcgtgatcaaattgtgttgagagctgtcaggaggggatgctggacccaagagtcagttaaatgaaggtatttgcagcagattgggagaactgtatcaggtcattttcctcatgaagaggatttatggagtggttctatgacaaaagatccatcctgttcccttccagggtctacagcgttcctctccaagtgcctgaggttttggtccgtactctgcaaaattggtctgttacatccagtagctctaacttcaccttttccaattattttctgctgatacctggaactttcatcctgaagattcaggtgcaggagggtcaatattgctttttgaaattcacagagatgcgtcatgcctcctactttggcctgtttgagcaccgtgaggggatttggacaacagcgtcttcaacctactggccatcacctttttcatccaggagcatgtcaatccaacaagagaattcaggcagcctaaccagatttaagcatgagtcccctagatccttttgtagccaggttgctacccaaagggtgggccaactatgctggcctggggttgctgtcaagggaagaaaataactcatgttcccaggaatggtcaagcagaaatcctgaatttgaaaaaaccttcattgttccctccatttattttgtcctgttgattatgcaggaaatggcaggaaagagatgatccctttcttggatcagccactttcgggggccaaagcaccctattaaggtgtgtggagtgggaggacatgagggaaaaagagacagaaatctttctgattcaatttttcagaggctattccaaagcttggtgataccagatgcctgtggatgatggggagaattaaagcccgtcaagtaatccttgactatcaaatccattatttaatcatttttgtgatgaaaggtgcagcattgctagactgaagatactctggaaagcctagcacatgacacaggttggtctgatgaaaggtgaagcattgctagactgaagatactctggaaggcctagcacatgacacaagttggtctcaaaggccacactagcatggggagcagaatcagattacactggagcagcagcactgtatcctgcaagagtggccggcagtgaggcagcatcaatagccctgagagggggtcaaaagtcagactgagtgagtgagtcttccagaactgggcaggggtaattccccatgccatgcaacctttcccactgagacagagatcaccttttgtcaggagtcaccaagtgtgaaatgcagtggtagtccctgcattcgaaacatagagtcttttactgtgtgcctagtctaggaaggcggacatgttgccacatctaggatgatgatggatccatgcaccaatggtgtccatgtttcaccaaggctccatcagcaacttgattttgcctggtctcatgagggaacaggcgtttgttgtgtcatctctgtgagtggcctaggtggtttgtgggtgcctacacccatcagattcccttcattctgagccccttccctccttatggctccttagcatactttcctgggtgcatatgtcctgcaatacctcttgagggagcaccaagaaataccagcccctctcataatcatctttctctttaaagcagttgaggtcagagtagagggggtaggaaggatcaaggggtgtgaaggtcgagagcagtttcatgccaataagcaaggcacaaccaaacacatttctaatgttatggactgcacaattgtgtccttccaaaattcacctgttgaaaccctaaccctcaatgggatagttttgggagatggggactttgaaggtgattggatcatgaggttggagccctcataatggaattagtgcctttatacgaagagacacaagagagctccctctctgctgtcctccctgtgagaacacaacaagaaggcagccatcaggaaaccaggaggcgggcccttgccctccagatctgctggcatctggatcttggacttcccagcctcaaaaaccctgaggaacaaatgtttgaaccactctgtctatggtaatttgttacagatgatctaactggccaagacactaatgtttgcaatccacacaaagttccgtgtcctcattgcttatgccatttaccctgactgtggacccttgggctcagcagctgcagccttcttgtcagctggggctcaggttgccaccccattttcatgaaaacatccctccctccttccaccccaagtagtgtgagcaatgaccacactgtccttcagcagctcgttttattcctacttctcactgcaacctccaaacgttcattaataggtcggatagtgaagatccttactcactgcatcccccacccatcagtgtgaaatagcgtttgctacagggtgtcaaggagtcatttcatatccctgacacagcctgggacgcccacttccttacttttccagaaagctacatctttgtcagcatcccattctcatcactgaaatctgtcaggaactgtgatggatctgagattttacccaacaaaagacacgagactcctgggtcctaggcaaaagactttattactgtggcacagccagtggtatgagcttcaagttcacaccagctcgccatgctccccaagcaccccaaatccacaggtgtgacccagagcagcgcaaatggaggctagacacttgggttgtgtttgcatgacagctggataactctgagtttggggaacctggatcttttataatggactgcaagtaaacctgctcaacttttgcctgggagggaaatattatttttgttatactgggtgttaaagaaaacatgtcctctgctcagaagggagatattatctctgtctttcaggttgttcagtctacaaatatccatgaaaagataggtcctcttcttgcaatatgtgcagaaatgcaagacacccatggagaatatctcctgtgaccttgctaaaaggattctagccagaggcactgagcaggttattgttggagctctactcctatgttgagagcatcccttgattcagccattatgtaggataacatgccaggctctggaataggcacagggtagtgaataaataacacagtaattgtttctgccctgacagagcttatacagacaaaataataatgatgacagctacacttatatagtgctcactatgcactaggccttttctgagtaatttatatgtacctacttatttaatcatcagaatgacactttgaggtagatactgtggctatcattctcatatttatggatcagaaaacagagagagagtgttagagtcagaatccaagcccaggtagtttctgaatgtatgcttctaatctgtcttagtataactaagtacgctagttatacttagtataagtctgtcttacatggcttctagtggaattaccacacaggattataaattcagtgattttataataaaagatgaactggggacatctaggaggagtttctaagccagaccaaagggctgcccagaagaagagatatctaagaacagtccagaagggtgagtggacattaaccaagggagctggagaagacagttctcagcagggaaaccgcgtgtgcagaggcccaggggttggttgggggcttcctgagatgacagtaacatctacttagatgggtcatttgttgtaaggcacacatttatttggaatgagtcagctggtgaaatttcccccagacttctaattcacagctctttgttttccgtgtatttttaactaaaatatgcaacacttctactgttgagatatcacagcagcctctaaagtgtcagcaaaataagccagggcatagccaaagtgacaagtgaaacccagcattatttgaatttattttgatttttgtagaattcaagtgtctaattattaatattaagcaagtagagaaattaaggcaagatacacatgggattatgggacacaagaaaaaaataaatattcaaagcttcaaagactttttggatatgaatagcttctttgatggtctctcttcattatggaatcctgttaggcatcattgtccctgtgatcaatggctagatctggccatcatcgtcagcctcccagtagcctgggtgaggctccctgggttgtgagtgaagactggttatcctggtctttcccatgctcattccacattttaatgcagtatcaccagcttgagagtgccatgtgatctgacagctttgaataattgatgcccctcatactaaaggagagtttaggttttgtggttcagcaggatgctttactcttgttgaccttaaccttcagaggcactcgggcattaccaagagatcaataaaacttaccctggctggtctgtgaggacaggagcctgacagagagtgatgatcaagaggagaggatgggaggattacgctggaacctggggaagaaaagggaggatgtgtggggtagagtggggaaaggggtggaaatagaataggggagcatcgcagaatgagggagacaggagctccgaaaacgatgaagtgcatgacaaagcaatggaaaacaagggttgaacagaggagaaagagtatcaggaggaacatatacagaagccaagaggatgaatgagggacgcacaggccaggaaaggagctctgatctgtaaccctcctccagtctgtggttgcaaagctgtacagtggagggaggtcaccagggactcaacgtctcctggaaagcagacaaggaaataacttatagagtgaggcagaataaaataagggttgtaagaaaggaatgcagtcactgctgggcattggaggcacataaaagggactttaatgcttgaatgccaactacatgctaaaagggcatcggcacattattttaattaattattattaattgtattattaaatattgtaattattacataatatttagactaattgtcaaatgaaagtctcaggtaggaattattgtcctcatgctaatgatgaagaatagaagcttaacgaggttgagtgctttgagtaagctcgctgatcagtggtggagctggaggaggcttgtgactctgaagcatctttcaactcttgtcactgtctcaggctgccgcccagaaaggcaaacattggagtgatttattcttacaaaggcactggagaaaacttcagtggactatcagctaattgaaggtgaggactgtgtctgagttttcaaatctgccatggctagcatagtaaacactgcataagaatactaaatagtacatggaaaaaggaagggttggagcttgggtaggtaggtagagagcaaaggagggagggagggaagggggaaggaaaggagggagggagggagggaagggggaaggaaaggaaacatgagagggaagggaggaatggtatttgtgctgaatccagaaaaacaaattgcatttttctgggggtgatggtaggatgaagaacactcgagggtgagttaatagcataatcaatatagagtttgcatttgtgtgataaaaaaatgacaaaaattcactctagccagagtctagttggaagaaaatagtgggagatgagtttgctgaaacagaatggatcctgattcattcattcattcaacaaatatttaccgaggcagaataaactaagagttgcagtaaaggcacagctatgaataggcactgctaaaggagcctaggatacatcagtgaacaaaaccaacaaatacactttccctcacagagcttacattctagtgaaaagagacagacaataaacataatacatgaataaagtctacagtatgcaaaaggtgacacatgctattgggtaggggaaaaaagcagaatagttgaacaagagatacagggacaagtccaaatagtatatttaggttaaccattatggaggcgatgtttagcaatatcttgaaagaggtgaaggaatgattaacgcattttcctaggaaataaattccaggcagaagggacaggctatgtaaaaacctgaagacagaagtggacctggagtgtccatgggcaggggtggctgggatgcagagtgtggtgtcaggtaagtagttggagaggtgacagcagtctcgatcaggtcaggtctcagggaccctctcaccatgacagaaacaggacccagtggatggctttgagcagggtaggggtagaatggaatgtgttctaaaatgggacgctggcctctgtgtgaggacagacatggtggcaagtggtcagataggaagctgctgctgttgtcactcacagatggtggtgaggaaggtgcccagggtcagattgtgaatacctttagaaggaagagccagtaagacttgctgatgggttacatgtgggatgtgagggaaagagaggtgtcaagagcaattccagggcttctggccaagttgccactatctaagatgggctatgatgtgggcaaagcaagtttgctggaaaagatcaggagttatgttgtccacattaagatgaaatgagtgttagacataaaagcggacatgccaagtggacaggtgaatataaaagaggctggcacggaagagtgatgtcttgtaggagatttacactggagtggggtcatcagcacacacatggtatttaagactgtgagatagaagagatcatcagatggagaatagaagaggtccaggcatcgtgggtggtctcaaatgccatacccacagttcgaaactttaatttatgatcagtggggggcaactgatatatacttttggaggataggcatatcacggtctcagctgggcttgtttcattgatgcttttttttgtttgcctgttttgtgcagagaccacgctgaggtcatgtgtaggttggccctgggaaggccaaacaggaggctggtgcaccgagccacatgaaggtgggatgaggaccaagccaggaccattttaatgggccagggaggagcaaggagcaggcagagataaagggaagaagggaaaagacaaccaacttccctttcactcagttcaaaacagcaatcaccagatcaatagagaagaaaacataatttaagcctgaaacgaaggtttttgtgttttcttctctctcttttttgctgcttgaggcatggcaatgcttgataatgctttgcttcctgggggcatagctgacaacagtggggaaggaaatagagacaaggttttcagtattttagaaatctggtttctatctgaactgtggagggtgaggagcctgcttttctcattaactggtcagcatgttcagaatctgagagggaatttttgagacaaacagatctgaatgccttcagatagaaagatggaaatgtttctcctccccaaagtcccttgaccttttaaataattgccattataccaaccgtatataggaatcggctagaaataacataaataaatgcgaaaccatgtgcctacacgtgctagctagtgttttaccaacaagaatgggtacaatttaaaatcacctttatacaattatcacaatgcactctcacaatgatcttgtaaagtgaataaggatctcctcccctacatattttactgggaaataaaaaacaaaaaactaagacgtaagcaggctgtgacttgctcatgtcagagagaaacagaaccaagaatcaaaccaatttgtgagcggaggtctgcttctccacggtgtttgctctctggagacagagggaccatgccactgaatacactggaccctggtatccagtgcatcctcaggcccataatttgccattgaacagttcatgatcctctaaacttggcgtcctccccagcacctgtttcttaaacatattaaggttaaagagtggcaggtggcggcccttcttccaatcgtacccagcaaaagtaggctcaggggctcacatctggagatacaaagggatgcccatttctgtgtctcttgcctgatcttgaaattacccatcttgcctgatcagcgtttctgtcttcctgactccatgtgctttccttctgagtctttctggactgccctcatgtgctgtagtaaaagtgtagcagcgtttcaagctatggggttattgctgggatattttatatctaacaggcatgggggtgataattcctttttcacttttataattcacacatatcctcccccgaaatgcatttcgtatagagcttttaggcaactgaacacaaagagccttccacccccttaattctcctgatccttatttcaactattttcccactggctttttctcttactgcactttgggccaactgaaagccagtggtgtttaagaactcccttatggattatttgtcagtaggcaaggggatgctacctctatacctgaaacttccataatcaagcacagtttattacagagcaaatacaggacagtagcagggcttttaaaaatcaattagtgtgcaattcaagattaaaaacagaagagggctaattctatttttcatttggatggtaggctgcttaaggaataatagtacaaagactgaagtcattacaggaataatcagaagtttacccaggtgtctttctgagcccctttcctcctcaaggctcagtagcttactttcctgggttcatgtgtcctgcagttcctcttgagtgagcaccaagaaatactagcctctgtgaatgacaggtgggggcttcatgagagctggaggtgatcgaagacaggtcacattctcctaaaacctctgatggtgttttctcttcctatgctagaatctactccattcttttagctgtactctgtatgaatcatatgtacttgttcatgtttttctgcaattactcaaaactgtgtcttcttgacatatgctgtttgtccatcagctccagagagcaggctcctttaatctgttggctttggagactgagcaaggggaggcagggtgagtcctccatgcctttcactatggattagccacataatagatgttggggtttcatagtttggggttttgtggcatatgatgtgaatagaagcactttagactctcggcagatctatctctttgaagttctcttattatgtctaattttgagtactgcacagaatagctataaattttgacaatgataacctgctctctaaccccaggcaacctgctcctcttcccttttcaatgttttcattttagtataaagaaagagcgatgataaatttttttatttttattttttgagacagggtcttgctctgtcaccgaggctggagtgcagtggcaccatcgtggctcactacagccttgacgtcctgactcaagagatcctcccacctcaggctgcagagtagcagggaccacaagtgcgcagcaccatgcctggctactttctttttatggacatgacgtctcactgtgttgccatgctggtctcgaactcctgggcccaagtaattctcctaccttgacctcagaatgtgctgagattacagatttgagccactgcacccagctaataattcttatataaaggcaatgaaagcaatgcaattagaaacttcacctgcaccctgtcacaaccaaatcataattgtcctcatgcatccaggtcaagaataatggtgttaaaagccagttatcatggctccaatttttctatgttgacctgaactcagcttgtgctagtcttgggatttgattgtatgttttctgtttggcttccatgttctacctgccagtgggcttggggacctcttgccactctgcaccaggtaaactggaactccacatggaccttccgatttggtactgagctgtcattcatttgtcaggcctaatgttgctaatcctcttctggaaactttatccttcccgaattgggccacctgattcctagctgaatgttcacatctgctccccattccttcctaggacctgcagacagaggcagcaggtacagttaaactgtggtcctagcctctgggattcagcaacacttccgcctcgctgcttatctgaccatttttattcccaggcttatgccagttatgatatacattccaatcttatacctgggctctcccctcattcttcattcctgatcccactcattattcttcattatttttaccacagatgcagggtggctgagggttgagttaatcacattcctcagttcatagcacatcatcatccctgacaaggggatcattgatccccaaaagtgttatcttatttttcccctcatctctgattctatgccttgtccctttctgctacagcttcccacaccaaagcgtttcataaatttcattaaatgtgcatgtgtctttataaaatgtgatggtgcattgtatgcatatgtcactgatttatccatttatttgatttatcagggctgtctttccaattcccctctaacccaaacaagcctatgacaaacaaccctttacaaaccaatgagaaatttccctagtttcatagccagcggtgattttgctgggtcatgggactccacaggcttaattgtctaaatagctgccatattgcttttcaatatggatttacaagtgtacactcgccagtagagtgcaagagtgcccatctgcatgcatctccaacaaaacttagttttctctaatctctgattcccatttttaaaaccatgttcacgggtgtaaaatgacacctcactgttattttcatttgcatttctctggtcactggtgtgagctctttaatttgtgtgctttctcggctttttcttatgtgtattaccgattctttggcctattttttgattgaaccacctatctttttcttgtagattttcaggaaaaaatgcttggtatattcaagatgttaattacttctcagttgcagatattgaagatatgtgtcagtagatattgaagatatgtatcattttgctttgtcgtctcttaccatttgtcagtggggctcttcatttgcggtatagtgattaagagcatatatgctggaaccaacctgcctgggtccaaatcttaactctgcctctgagctatgtgacctcagtgatggtccttaatcttctatctatatgtaaaactgatatattaaaatgaccatctcagcttgagcaacattctgagaccccacctctacaaaaaaaagaaaaaaaaaaattagctgggcgcagtggctcacgcctgtaatcccagtactttgaaggccgaggcaggtggatcacaaggtcaggagatcaagaccatcctcgctaacatggtgaaaccccgtctctactaaaaatacaaaaaaaattagccgagtgtggtggtgggcgcctgtagtcccagcttgggaggctgaggcaggagaatggcctgaaccctggatgcggagcttgcagtgggctgagattgcgccactgcactccagcctgggcgacagagtgagactccgtctcaaaaaaaaaaaaaaaaaaaaattagccaggtgtggtggcacacaactgtagtcctagctacttgggaggctgaggcaagaggatcccttgagcctaggagtttgaggttgcaatgagctgtgattgcaccactgcacttcagcctgggcaacagagtaagactctgactcaaataaatacataaatacatacatacatacataaaaataaagttaccttcttcatagggatttactaaaactgaatgagttaaattgtgtaaataacttacaatagtgtctggccaaacacatacatacacatacatgtatatatataaattatatatgtattttcaaagaaaacaaataataatttcttttttagctttataattttgccttttccatttaggtaattaagatgaagtctatcttacataataaaaaataatcttaatgtaacaaaaggtagggctatagctttgtttcctcccacgttgtgagccagttttccagtatcatctactaaactgtctgtcattcccattgctttgagggactactgttttcatatgttgggttcctgtatttacatgcttctttttctgtgtttctgctttggcctccacattgcttttctgttcatctgtgctgatggaacccccgcataatgtggctctcttggtttccataaggctctcaataaccaccctggaacagaggcagtgtcagggtattaacataaacatgtttttaaagataaaaaagagtgccacttacaatctcatgtataattttaaatgaaagaaagcctgtgattttgggccactgttgagtgaattgtgtgtcagcattctcattttgaacgtgtctcattcagcgatgtctaaatcactttgtgccatcttactaagtagaaacaattcaacaataaccaggcagataaacaaataatcaagcagaccaacaaaaacaaaataaacaacatgtacttaacagtttacttaagtaaagaaaagattcgttctttaggatctgtgaagaactctaaatgtattagaatgactccactttccctaaagagtgttctcccaatcagggctgcctttttcctctgttcccatctatagtcatgtcaccagggatgactgcgcacaagtgaagtggaaaaaacacagtcagatgtcatatcacctctaatcctttttgtgcatccagttcttccaataggatacagagggggaagttgagcacaagattctgcagcggtaactcaggacttttgggaatttcaaagcctagaattctaaatgtgaggcctctcacttagctcttactttacagcatgtggaatagttcagcccctcaccatccaaggcaagactggtgaacctttattagtgcttctcatgtgaagcatccatgcttgttcctccactccacagtgaatccctaagggcaggaggggagtgctttgttcttctcatcttgtttttagaagactaactggcacaggccaggcgctgtggctcatgccgataatcccagcaccttgggccacagtgggcagatcacctgaggtcaggagttcgagaccagcttggccaacatggggaaaccccgtctctactaaaaatacaaaaattagccagatgtggtggtgagcgcccgtaatcccagctgctcgggaggccaaggcaggagaatcgcttgaacccgggaggcagaggttgcagtgagccgagattgcaccactgcactctaccctgggcgacagagtgagactcagtctgagaaaaacaacaacgaaaaaagaagagtaactggcacagcataggcattcaatatgcacaacatgggcttggactgtgtggttcactcatatgcagattttcttctgcctgtgccacccctgaggctggaagaccaactcctcagcctactccagctggagatggtgaggacgaagacctttcagatgattcacttccacttcatgagtagtacatatattttttctttcttgttattttcttaataacattttcttttctctagcttactttattttaataatacagtatgtaatacatgtaacatacaaaatatgtgttaattgactgtgttatcagtaaggcatctgttcaacagcaggctgttagtcattaattttgtggggtgtcaaaagttatatccagattttcaactatatgggggcttggaaccctaactcctgagttgttcaaggaacatctgtgttcaaatgaatgaatgaatgaatgaattgtgttaaaattgtgtctgtgataacttattccttacccaaaatgcatttaggctagctttttttaagataggagtccttttgcattttccttagcacctcagaatatttgtcctatagacaatttgaacagtgatgagcatttgcatatttataatctacatgtgaacttatacctctttgctctcatgttaatgagttcaacacatagtgagttagcatcttctgtgagcatagcataacgtctgagaggtgcacaaaagatacgtgtaatgtgaaaagagattagaagatgtaagcatgggctcttggatctgactgcctgggttcaaattttgaccctggcatttataaaaaacatgaccttgggtaagtcactaaaatgctctttgccttagtcttttcacttgaaaaatatttttttttctcatagagttattgtgaaaatttagtgagataacatatgtgcaaggcttggcacatacttagcactgcataattattaggtcctagtgtttttacagtctgacctacaaaactttcaaatttagagggggaaataagacagagactggaatagtctaaacttttgaaaaggctaaaacatatcacaaatgtcctaaattatgcctatatcgtgtccttctgcgagcctccactccatttattaatagtttgcaaaaaccttcagtagatctccctgcattgacaagtgagttttcttttcttagtggagttcttcagacaatgcaatctgacctatcttgtgccttaaaaaatattcaggtacagtaatataactgcctagtttccttgtttttctttcttcttattttttgccttttcaggtaacaagtgggaccaaaataagaatcttgccttctttttttttgagacagagtcttgctctgtcaccagtctggagtgcagttgagcaatctcagctcacttcaacctctgcctcccgggttcaagcaattcttctgcctcagcctcccaagtaacaggactacaggtgcacgccaccatgcccagctaatttttgtatttttagtagagatagggtttcaccatgttggccaggctggtctctatctcttcacctcatgatccacctgccttggcctcccaaagtgctgggattacaggcgtgagccactgcgcctggccgaatcttgccttcaatggaaagcctagtcttctagatttataagccttaaaatgttaggggaggggggaaaaaaaacctccaaacaaaaccccaataaaagcttaaataagggcctacgtgaatgaatttgtcatcagatgtgtttgggttgcttgccaccctatttaacggtgtgtttgttttgtgccttttctgcctgagttggtgtaaatgtcttttctccacggtttccttcctgtgatgacatagatgggttggattcgagagtcctcagcttaccgctcttccacttgaaaggaagagggtcatgagaggagaggatttctggagtggaatttcaatctctggtcatcaggaaagggaaaacattctgcccaggatttcctgtcatttattctggagagctttgtgttgtgctctgtgcaggatccgagatatgattaactcaactctggagtctgttggcagaaccaagcagctctggcatcagaagagagatgtccttaggcctaacctgccctccctggggtcttgttacctgctcaaaaagaacccagtggcctttgaatgcattttaaatctgtgattggtgcagtttgatggtccttccttccctccttccctccctccctccctcattccttccttccttccttccttccttccttccttccttcctttcttccttccttcctttcttcctttcttcttcagtttaactcagctttcaataagcttaatgggatgaagtccaagcgatgaaaagagaggtgataagagcacaaaggggaagcttatacccgagcatgggtgagtacaggagatgggttgttctgattattcttgctcctgttttgccttggccaccagttggccaggtcggggacagtatggtttatggactgctgtcacttgactcttccttctcagttgccttttaccttggatgaattttcaacgttctcttcccactttcaatcataaggagttgttgaatagattcatgttttctttcattcttccttccttttgtcttttttaactataggagatgggcacactgttcaacacacagataatttagaagaatgtttcagtgtcagttcttcctctccaccctctttcaccccagttcagtcataactgaaatcacaaatgaatggatccaattaatagtaaaaataaaatgtccaggatgctctctggagttctgagatccataggtcacggacagactcaagaatacaaagtcttcttcaggcctctgtttctaatttgcagaagaaaacaagagggtgagtagtattttgctttgaaaagcatctcagcgaaagtgctacatgataacacagccctcatttccataattctgctccctccggagcacaggtacatttaatttctcacaactgttccctaaatgaagagcagcatgaggaatacacagagaatgaaaaatatcggtgtgtgtgggtagtacatgaccactaatctttcctgacatttactttcactcatgagcacaggggtgaccagccccaccagtcctagatgctgaagataaatgtcagcaccatccattggaagctttctatgcatacatgcatattggaaatcaaatatatttggcttatcacacactgaggaacccatcccttcagaaatgcatggattgatctctgctaccccactcaccagtgccatttggtaaagttggggaatggtaagatagttcgctgcatttttaatggaaggaaaacaaaaagcgactacgcgtaacagtttttacattatatgccttcagtgctgtgtgctgtcaccccacgtgttgtactgccaaatttcccaagagcgtctgctcttcctattgtgaaaacaatgagctggtgtatgtcatgcaaggctattctgcccatgccaaatagctctgtatgttttaactgtcttcacactgggctccaccaatcactcaggcgcatacctcttcctcagccctaggcaatagaagttacagcattcatgagcaattgctttcctcacataaaggaaaaaaaggattttggtcttaaggtcttgccagctcattgactaatttactcctaatcctgaatgtataaagccacttgaacatttcatttgtgtgacatggttaaaggcttacgtaaatatagctggtaagggctaggattgtagattaaagtcagaaagaggtgattttgttctttttgactagatactgtaaattctgatgtccaattaagatctgaaggagaaacctttgtaacccaatgcaatgtgagtttctcgaagaaaaggaaaaaaaagggaaacaagtctccattctcagggacccattaacagctcagtacaatgactctttatgtggcctttgatatgcaaaaacagcccaaaataatttatggagaaaatcaattatgagctgaagagaaaaagaaagttgcccagattaattaccaagtcaggaaggatggcagtgcaagcacctggagttatgtccaagggggacgcccttctgcaaaaattcttcatggtcagaagaaggctctgtggtcaggagagaagggagccacatgaagtcagatgagctgagctgtaccttctggaatgctgagaatgagagcgcatatcatctattcagtgagataaaaaggctgcttcaaaactaaaggtatatttcataccctcgagtgtgaagtgcaaattgacaatggatggaacaatagcattggctagaaagcctggaataaaaccatcacaaattgaatttagagaacttatgaaagctaattttatgcatgttttattttattacatatttttctttaaaacagtaatagactcagggatgttggcaatggaggggattttagaacacctagtctggtggatttcaaattattcgggtcagagcacctattcttttgaacaaatcttactcattattaagaaattaaagcaaacaaagtcagaagaaaaaaaacagtagacctgctctggctaaggggctgatgaggttggagtctcttccctatttcctatgactgttcccgaggctcctgcagcagtaacctaaggctctagagtctcttccctattgcctatgactgttcccgaggctcccgcagcagtaacctaaggctctatggaacactatcagaactcagtgattcctaatattagttcccacactagaaccatgcatcctctaccaaaatacgtttccttagtttaataagtttgttaaatattgcttgcacaacccagagtttggagaattacattagcacattgaaggctgtgagagtaaaacttcagatttgaaatgcattaacctatgtttaacctggtttttcacctgcatacttgaatgtacctgaccgggaaacccttttatcagaaacacgtattaacattctgtggcagataagtcccctaggatgcagtttagaaaacaaaactcttgtctgggttccagtctaactcccttgttttttaagtgagggtacagagcctccgagagcatgtaaatcgctcgctcttgggtacatacttggaagcaaagttaggaaccagacataggattcttgaatccatgaagctaaggggattttcaaacatattttctttaatatttccacatgtctgtgggcagggagcagtcatgttctattcttttgatgctatacactgaaacacagaaagtcaaggttacccagtcaaactctagtataatccttccttcagtgccctggtcggcttgcttggtgctaaaagaaaaaaatcaatccatctccctgctgagtggaagaggataaagctgtccaatttttagatcttagatatttaaactaaagaagtgtgtgatagcattattaacaattggcgtagtaatttcttgaggtttagataaactagtttacattcgcaacatttagtgatgatttaagatgctttgctatgttggcattcaaaaattgggcaaacctctggccaaagtgaagtacagcccatgtgagctatggaaatgcaattaaaaggagtcacagagccttctcaactgcctgggcttaattaagatatgatctgccagtctcttagtggccattaattcattgtctggtaatccaataaggggttattgtttgaagctgtttgagagccacttgcctcactattaactcaaaattgcccaaaaggcggtactacaatgtcattctccctgccccaaagaggacatgacattgaaagacatttgacatccacatttgacaacacttgaaatggcaacattatggcttaagcattcacaagtctatggatatgataatggaactagtgacatctaattactaactggcaattaatgataatagccctttgtgaatatgtagggccattctctatagggagctccttgctctttgcacatattaattaatatagataggcaggtaggtgatagaaaggtggctttataacattattgctgctgagtaaactgagtcaggttccaactgcaccttgtagatgcacaacgattccttgctgttttgaaactaaatggattacaattttaagagtaattaaagaggaatgagaactgtagggaagtgaagggaatggatgtcaaaggaaaattcaaggtatcactaactatttgaattcttgatttacttccacccatgtttctggaataggaattggtcatttttcccggattggtagccagatatgaaacattaagtcggctttcagcaaaatgatgtctggtatattcagaataaggccgatttattttctccccacagagccccattgatgctgaatttttattgcccaatagaattcaacctggttgtgattatcccattggtcctgctagataaaacccatgtgtatttgccaaacacccacttggaaatggaaaatttaattaaagacaggaaactgaatttaatgatctctactgatctcttaaattccccaaattatttcattatggcttacttattgaattttcttaaggaattctaaaataaatgaacaattacctgaattttgcagtgttgtacatagaaatagagtgagttttcaccacactttcaaaaacaagtgagagtctaccccactaattcatatattctttcattcataagcatttattgagcacatacagtgtgccaatgctgtgctgagctctgggtgtactgatagaaaaagctttgatgtggcccttaagatgctcagtgtggtgatagaaaggaagttaaacaaataagtacaatccggagtgaccaattctacaacagaaagatgagcaagttatggggagtaatgagggcaaagaggaatgagagttaactttgtgagtagcccctgcctggctgtgcgataggggttcaaatccgactctatgtttatgggaagtactttgttccatctgcctatccacctgtcattacttcaagttgatttaatagttctgcagttgggacctgtggggtgtgtgtatgtgtgtttataataagtttaaatgaggtaatccttttataacctcactactccctattgggatttgtttgttttgatggaagggagggagatgagatttggcacatagcaggtatccagcaaatgcaactgcagcctgaagagtcaacgtggacaaatcccaaacaatgtgagccctttgggaatgctccgctttgtgtttcctctgaattgcatgaggctaccagatgaggacaggaggagaaagaattaaagtgtcctgacaccgtgttccaggttgtgtagcttttaagtgggcacccatttttccacctaagagctccaatgtgcctctgtttgaccacatggctttccggttagctgtgtgacagctggatgtcccagcatttctttctctccctttccaatcacgagctggagcagtcttgatgaatctctgcaggcacgtcgtcctcaactgagggatgattcattggcatgaagctgttaagtgattaaaataaagcacttttatggaaacgttctgcttactctgtgttcccagacacctctgtagtgtgtctgtggcaagagaggactgtaggggacacacatcgtcttatcattttctctcttgttacaatatccaatatttctgtgctagggcagaatttgaaaattgtagttcaattcagataaccttgcatgtgctcttgggcccttgaaaggagagaaaacaggcctggtgcggtggcttatgcctgtaatcccagcacattgggaggctgaggcaggtggagcacctgaggtcaggagttcaagaccagcgtggtcaacatggcgaaaccccatctctactaaaaaatacaaacattagctgggcgtggtgtcaggtgcctgtaatcccagctacttgggacgctgaggcaggataattgcttgaacctgggaggcggaagttgcagtgagccaagattgcaccactgcactccagcctgggtgacagagcgggactccatctcaaaaataaaaaagaaaaggagagaaaacaagcaaacaaaaaaacccacagaaaacaacacaacaaaaaacactaaaaggaaaaaaaaagaaaccgtgcagtttgaaattatctcctaggttgcccatctgcccaaggggaaaagtctatgagaaacatactggggtggagggaggggggacttggaggcagcaacacactgttctcatgggaagggaggctcctttttgtttgttttgtgcacaggaacttgccctgattggagtagagtttgcaaccctccccagtgtggggtttctttgttacgaagatcaagagaaggcatagggaatgcaagaatgtaaagagaaagaaggggcaagaacaaggatgaaaggagctggagaagggaaagggacagcgatggcaggaatggagagacacgagaggtgggatgaggaaacaaggagggtcatggaacagacacagctgctcctgaaagttcaggagcagctgggagaggggcttctggcttcttccagccagggtgctcccctatggaaagcagagtttctgggtctgtcccgtgtatgtgccctttaaagcaagtgtcactggagacacataaaatgaaagggggggcagggtggaataaagggaaaaattattgtaattcttaaacagacaactttaaaaagcagtgatttaggttgttttattcattacacgtcataaaggactcaggctgtggtgcccactggctttaaaatctaggaccctattaaaacctttccttgttagtaactcagagctttggaaatttgataagaaaaaaagccaatttaatcaaggcaagatttaacacaaagaaaggacctggtcttgcctttctgcagaaaaactttcaggatcaaatggcttatgattttcatttacctaaagaatcccagtggaatcagcagttggggagaggaggggtcatttcattagcttgcagggcatgcccagattcagtttcttcacacactactggctgcttccttagctactcaaaggaaaatgatttttttttttttttagtcatactacatggaagaacacccattgtctaaagaagaggcaaaagcaaatctgcctaatatctgaaagtaggaaaagattggttggtttatcttgacctcagtagatcccattttcaataacctgtattgtaccttcaatcctcaaatgataatgtggcatttgtggcatcacaaaaagagatgctggagttggggagacacagggttgagtccaacctctctaaattgtgtaaattattaaaaataaaaacataacaaacctcatttttcacctctctaaaatggagagtataaaattgtatctttttttttttttttttttgagatggagtctcgctctgtctcctaggccagagtgcagtggtgtgatcttggctcactgcaacctctgcctcccgggttcaagcgattctcctacatcagcctcccaagtagctgggattccaggcatctgctaccacacccagctaatttttttatttttattagagatggggtttcaccacgttggctgggctagtcttgaactcctgacctcaggtaatctgcctgcctcggcctcccaaagtgctggtattacaggcatgagccaccacgactggctataatattgtatcttctattatataaataaaattctctgagttgactcaatataaatttatgacttgctcactcaacaatctacaatgaatgtttctgattgttgttgaggagagaggctctgctccatgtagtcactcagggatccaggctaaccaaggctctgccatcttgaacacatgacgtccaaagttccctgagcattagcttccagccaaaggaagaggacagaatatagaagaatacataagggagattgttaaatgtcatatggtatatatcactttttcacattcttttggctagaatgaaattacttgatctacctgcctgtagagccaaagaaaaggaatgtaacctaattaatgccaagaaaaaatagacacagattttggtgtacaggtagcaatcatagctacagtaggcatttaagtaaatatccatttgtacccttcttcacatactcagaatacacagccccaaggtagactactcaaaatccaattcaattactgcattcagctcaaagtccgagttcacctggtggtatttactcctttttcttcatgatcagccatggctgtttatggatcactgacgtataactgaaaagattgccaccccttattccaaagtccttttaaatggggtagcaagatgggattatcacagtaaaacaccttatttggaaaatggaagcattgaagatacacagcagttactggttcatgggtgatatttttgccccggcagtggagaagcttcttatctatactctgattctgttctccaggaggagatttcttacctattgttagtggtggctccctggcgtcacacactggatagttcttctttgttcagcatcctccatggccacatctgaagtggtcattgtggagtacgccctacttgggggctgaatgaattatctagcccatttgctgtgagtgcatgttggggtgtttggcagttggtttacagttccaggctcttttaaaggaaaatcatagtttttcagctacacaaaaactgtcaaaagtatcataagcttcttccctatttattttcaggcagatccatttgccacatgaaaaaaaataaaaaatataaatagatataactcatagacctacattattgctttctttttgtgttactgtgccctttttcttctcttaatgtggatacattgggatactctgaaagaaagggcgtggaaaggaaggtaaaaaccttgatttgataattgccacgaaggtgaggcctttcgtcaaatcgttaagtaatattgagcctttgctgcttagaaccattttttttaatcttcttcctgacatttgagatccagactgagttggtgttctcaaacatttctgaaatcagtctctcattccctcccccttcatttgcttgaaaataggagcatctcttctgagctcatctcttgtgatcatcggtgtaaacaaagaggagtaatcaatcccagaaacgctttggctctttctatccatttcttctagagccgcaggttcagtaggcacttggtttgtcatagaagttatcacaagggacagttttaccaaacattttgctatttcacaacaagggtctacagacttctatctcattctgttttcttgacacccattgcccaagtgcaatctgtgaacacatttttgatttaatcatgccagaatcctactcttggtaccactttcaaaattaactaggggcacattagttgttataacaaataaacctgcaagtctctgtggagtaacaacagctctccatcctttgcccatgcaacagtgcaacaccgtgctactggcaaccacgggtgtcaggcttggcctcaggcggcatccgggaatggtgcatcaggaggggttgcctaccctcagtttgtgacttccaagatcaccacgagtcttgacatcttcctggggtaaggggagagcacgcggcgtcataggaaaaagttacgaagggcccgggattaggcagttgtgcatgttactcctacgctcattccactgggtagaattcagtcacagtgtcacgtaattgtaagaggtgggaaaatggcatcgagtagggtgcccaagaagaagagaaaacaagttttggtgagcagcaaccaatctctcttacaatatccaccacatataactgttgtgaggactgaattaggcctgtaaagagtctgtcatcaggacacagcacatagtgagtgttccacgagtgtttgctctgttcacctccctccgccctctaggcagccccgaagtacccaataagcacttaataaacacagaataaatgaatcagtattcatagttatttcccctctgaattggagagctttgaaatctgaccctgttttggattgaactatgctggatctctttggatctgatttttctttgaattagaaacatctcttaggaaacctagactatctttcaaagaaccccatctggcctattggaaacagtttcaaagttgaaacatcaaccatgacaggtcctttggccgctaaagatgcagcccctagggatatgtctctgctggctgttcacatgaaatagcatagcagagattggatgagagtcatctgctgttctggattttgcatcctctttaaacacatctgcctttaaacatcctttgcacaaaagcttaattttcccttccctaggttttaaatcactttgcagactacagaaaaagattacagaaggcctgtttttgttccattccttttctatacttgactatcacgtttgcttcttctacctgacattcattttattgtttcagttaattaaacatgtatcatgtcatgaaatatgtgggtcacatttatacacaactcaccagagttaaacttgctgtaaccatcctatctaaaattgcagccccttctgtccagaactttctatcttatactcctattttaacattttccttaacactttagctgctggcatgtgacttatttatttggtttgtatttgccttccttattaggaatataacctccatgagggccagagatttttacagttttcatttagggctctattgccactgcctagaagagtgcctgactataaagggggttcaataagtattcattgaatgaaaaaaatgatccttattccttagtcttaaataacttaattcttatgggggaaatctgacacattccaacataattataattccaacacaactccaacataattattaggcaaagaagattatattggttaatttatgatgtgtcagtgttaaccaagagatgaaaggggaaagaagggagaaatggttgttgttgaggatcttttattccaagcaaattttgcttacattatttcatttattttaaccagtgtggtagttctaaaaacaggtggtaaatgtcccatattactaatgaggaaactgatgcactaaaaggcagttatttgtctaaagttgtataactagcaagtggtggaaacagtattcatcaggtctgtctggctttagtacctgtgccaattatttgcaaagttgttcatactaatccttagaaataagcatattttaactggaacacactccagacaagtacacacatgcacactcccacacagactggaattatttaagatttagctatttgcaaaacatgttattctgtcctattcctcctattctattctattctattctattctattctattctattctattctattctattttcattccagcccatcccatcacttttatctttcaaaatttgacccattaagctgtttctgcagtaaacaaatgtattgcaatacagacttcgaagatctttgcttttaggcacattacctggtgaggaaaagaactgaagatttagaccacaaagtgaggactagagaatactttattgtggagacagtatttgaggtaggccttgcaaaatggattgagtataaagaaaatcttaataaaactttcatcatttcaagcaatattacttcacttaggcttctatcaaataatccaaatgctctgtattttatgatgaggctgaaaaaaagtccaaacactcaaatgtgtggctttcttcatttgaacagtcagccactcagtcaaagattagcaatcatttgcttaggaagtaaatattgagcatgtgctatatgccagccagtgggctaaatgctggaaacgcagagatgactcatgcacactgtctacctgtaaggaacatatgtttgttgccttagtccaatctggttgctgtaacaaaataccaggctgggtggctgataaacaacaaacatttattcctcacagtctggaggctgggaagtccaatatcaaggcaccatccgatttggtgtctgttgagagtccatttcctcagatggtgccttcttgctgtgtcctcacatagtggaaggggcaagcaagcttgctaggagctcttttataaggacactaattccacttatgggggttccacactcattacttaataattccccaaaagccctgcttccagataccagtaccttggtcattaagtttcaacatagaacttttgggagacaaaaaccattcagactgtagcattgaaggttattgtctgattaaatattaacctttccctgagttgatttgttaaggaacatttgcacaacggatatccaactccattccactgtcagaggaattggtggtctgatctggcatcctggggacactgcattgctctctctcctttcttccatcatgatataggatttgtaagttacaatggagctatcctttgtggcctggtgacatagtgactggcagtggtggatattccatgtgaatgatggctgtagacgtggtgaggtaggttgatgggttttgtcatcacttcttttacctgagatcaggttttttctccaagctgggaaaatgaacattgccacatccatttaaatcagagattcgctagagaaattgatatgtgtggttccataggcagtgccttcattttgacagttttctgggtctgatgaattgatggccagcagaggcagttaggtaggcagctgagcttacacaaaaagacctctgtctagaaggcttctaacaagagcctccattaaataggctttatgtgatgaaaacgtagtaccaaaaacactgttatatttctttattttaagcctatagtagtgagctcatattattttggaatggaaaaacagagaaagtaaaatatataaaaactgaataaaatagatatatcatcttcctgattctttgaatccagctatagtgggtccataaccttctgcaccagtttttgtttgttttattttgatttgttttaattgatacaatagaatttattggtactatgtttgatcactgagatacatcgttaaatatgctactgctgattcctttttaaaatacactggactgaaagtcctttgaggatagttctttgttattatgtctcatgttatcccctgcatgatgtcttccaaaaagtagctgctcaaaaacatactaattaacaaattagtatcaactgatatttcaaaacagcaatttttaatttataaaacactttcatatacatttcatcatttaaaaaatcaacagtaatttatttagtggtttgttcttattggtgtgtttaatcatgtttgacttactcattgcagaattaaattacgatgtgatattgcggtaatagttatacatggcataaaagaaacgaactcataggaattattcacttaactcgcgggatcagaaaaatgccaatgtactaaatgttagcctaataactatgggcttttggtatgttgtttagaggaaatgacatcagttaatctggcaggatatcgaagtgaaaagtagttaaggggttctaatgtgtatcagtcagattggctaaattatactgcaataacaaatgctcccaatatttcagtagcttacaacaaaggtgagttatatacacatgcatatttagatacatgcacacacacacacacacacacacacatgaacacatacacatacacttacttactggaccaaagcatataggaataggttctatttaggtcatgcagtcttgcttcagagggaaaagaatggtacaaccatgtgaatgctcttaaagcttttgttttgtagtaatacgtgagatttctattcctttttcattggctcaagcaaatcaaatggccaaaactgatgtcagtggggatagtaatgtaattctttcatgcaagaagttgtaaatatttggaacaataaagacatccatctattactgttattatatgtagctggaattttgagactggggtagaggaatcagtcttattgattttgatccccaaaagcaacctgtacatttggcagaataaattttattcactacattttatggagaagaaaacctaaggctggaattatttttaaacgttttcaactctcatagctgataaatggaaaattctagatttgaactgaaatctaaatctgactttcttcctaacctcaatcgaaatccagtactcttcataatgtggccatgctgcatatgtaagtgtgtggatgatgccagtaactaaaatgaaaaatgaaaatgttcagtagaggatgctagagaatttgtttttaaattttcgcttaaatatttcatattcttttaggtgaccaatattgaacgttcaaggtagttctcactgtacatgggtataatcatgattttcagcattaagattctcattttagcatttgtgtgggtctgtgtgtgtttgcatgtgtgtgtgtgtgtctataatgtgtgtgtgtctataaatccaggttccttcagtcttacacaaaaccttaacaaaatgttcctatagatcctgctagaactgctgactttcaaatcaggaattagttctgattctgttgatgtaaacctgaagagagaagaaaaacataattcaccttcctgcattattaagatttcagatacacagtttttataaaagcttgcaagtgcaaaatttgctatcaagcctaatgtagcatggaggattttgtctgagctagcaaaggatcacattttcatctcctgtgagtcagggactgagctctataaactattttccacatatatgttctattaaaaatagtatctcattttgactcttagtctgtttttatagtgagcgggctctgaaccgagttacctgataaattactttctgtatgtgtgatatacatactgtctaacctgaacaagaacactgacttcaggtacaaggaaaaccagtactgcacaataaatgggctcaacgactcattcagttcgattaatgtttactatacattaagcactgtagtatgtaccatggagcagatgcaatgccattctaactactgaggagcttttattgaagagatgagttatctaatctttgatagatagccttgaaataggacttaaaagaggtgtttttttgttgttttttgtttgttttgttttgtttgttttttaccttctttcttgtccctgccataaccatgcatctcttgcattgcatagttgagaacagcagttccacaataagagagtcttgtttgggagtcagagattgagttactgtagtccacttttctatccttttctccctttgacatcttcttctgattaattagtaattaataggtgattgattaaatgattactttagtctttcatttaataaacattattgaggacattctatgtgtccaacactgtgccaaataatagagagccaaggacataagcatagcccatatccttcattttaagtcaaatgagagaaacagacaagacaagtgtcagtgttgatgccacatgaccaaagccatgtcaagtataaacattttatgtaaaatgtagctattttaggacacagggaaagagtgacttttccgcacttaaagggcctggtaaggatttctaaatgaagtggttcttgaaataagtcttcatggatgataaggctaattacccagataaagaaagggggaatgcattctggacatgtacctgccattgcattcacaaaggcaggcaagaaacagcaggtccaggcatgcaggacaagtagttaagcttggtggaaatatgggaaatttgggaggaggagaaaggttgatgatagtggacaggtaaagacagaagtcatattttcatgaagtgcttatagtccgtgtttattaatctgcatcattctggatgtatatatggaaacctactcaatctaacttgggaaagaaaggaaaacctgatgaaaaatacacagttgattcttgaacagtatgggttttaactgcatggatccacttatacacagattttcttccacctctgtcaccctgagacagcaagaccagttcctcctcttcctccaccccctcaaactactcgatgtgacgactatgaagatgaagagttttatgatgattaactttcacttactgaattgatagtaaatctacttttttctatgattttcttaacattttctcgtttattactttattatacaaatatgatcaataatgcaatacatataacatgcaaaatatgtactgattgactatgttactggtaaggcttctggtcaacaattggctgtaataatttagttttgggggagtcagagtcctacctggattttcaactgcatgggggtccacactcctcacccccacattgttcgaagttcagctgtagaatgagctctcggtgtatgaacataagactacaactttgcttcaaaaacaggcaccaaggacaggaatcgcatcagggacctcaattctgctgttttctcatggcttttttattctcctctttatgcagaactgcttactctacttctctaatctacatgatggaacacagaagtaagagcatctaagattaaatcttacacacacaattgcctgaaaagattgaatacttttctatgttcctcttacaaattcactttgaaaggaagtctgtttggttagcttgggtctggtgcctacacttgcactggtgtaactatggccagggtgtgagttgtgtcataagagcatttttcctgtgaccatgagactggagaggaatggttgcattggaaatacccagagaaagacactggaaattttacaaaagatacccattatataaatggtcccaaatgccaatccacagagagggtgcctcatactaacttctgggagtttgggaaacatactcagtacttctgggggtttacccactaagtattctgatttgctagatctagggcagggtctgagaacctgattataaaagttcagtaagttattctaatgcctagatagattgggaaacattgtaagaaatttagaagagaggaaaccttaacaagaaaacaaaatcctcatgggatcaatttgcgtcatagtacacccactggcaaatagtttgggagagagaggctgcaggtgaagcaacttcttgggagtgcattgcagtcatccaggaggggagaaaggtcttacctaaaggaggagccatgcaaacagagaggagggctatcgggaaggtggagtaggcagttcgttgtcatcagttgtatctgaaggacaaggaatgcatctagaacaagtcccatgtttttggcttgggtaatgaggtaattaagtgatggagggggagaaatgggacttgtagtagaggatgacaagctgggttttgacatcttgtgtttgaaatgcctacagggcctccaattgtgcaagtccaggaagcagttgtatatatagggattctgagctaaagataatgcttttgtaatcattgtttgcaaatgatagatgaagacagtgtgtgcagatttcctagggtggatataattaagaacaaagaaaataagtctatgaatttcagagacatacaaaaattaaaggggattgagaagaatggaatagagcaaccataaaggagagacaggctgagcggtggctcatgcctgtaatctcagcactttgggaggctgtggagggtggatcacctgaggttaggagtttgagaccagcctggccaagatggtagaaaccccatctctactaaaaatacaaaaaattagctgggtgcggtggtgtgtgcctgtaatcccagctactcaggaggctgaggcaggagaattgcttgaacctggaaggcagaggttgcagtgagctgagatcatgccattgtactccaatctgggccacaagattgaaactccatctccaaaaaaaaaaaaaaagaagaagaagaagaagaacaaagacataaacagcagcataatagaaatcaagggagctcgtgtctctaaaggtggagaaagacattaaagaagacagtattagccaatggtatgaaacacttgttgcaaacatgctcattggatttggctagtgacaagtcagtgattaccttgagaagaacagttgtattctttattgttatttacatacatatctgtcttccctacctaatggtaaacttcttttgcagtcaatgagtaaacattctgaggggtgggaagggagttctgaaatatgtaatttctgactcaaagagctcacaatttaatggaaagacaagtaaaaagatgataggagaaagtgagagttgctgatggaagtctaaacaatattaggggagccctcaggagggatatctaacctctcaaccaagtaagcactcaataaaagtttattagcacaaaatacatgctgggacaaaaacaagtggtatcattagaaggtgcacagaaacaggagcatctaatgtgagcgggtgtgttggtgagattttgttgagggaagcaacttcttgtctgtttttttatatgctcgtatttttcagggtttcatcataagcacactagcctcctgtggctctacacagacacctaggactatttcatcccacttcagtaattttagcttttgggccactaactccccagtttatgtttctggccttccctggacaccagatctatttctccagctgctgtttggatatttcccccatatatctcacacatacctcatattaacaaggcccaaactggactctgtatccaacttcatattctgaatttctactcctaaactcattatgcacctattcactagatacctaaaagctgtcctagattcctccccctctcttattcctcattgtttgcagtttatttgtaatgtcttttatctgccatgtgcatttatgctgccactgtggtagttcagactgttgttccctcttatttgcattattgaaatgagccagactgcctgccttagatccccctgtcctctagtgcaccctgcacagcatgcccaatctcacctttctatctcctttaagcccaagtcctgcttcagtcatggatgatccatggtaaggatgggttatgatctaagcacttagcaggtcatgaaacatcttctttacctgttttcaatctaggcctattcagcaatatttaacagaatctaaatttttcattctttgtgccacacagtggtccaggtgctaggatgcaagcacccttgctctgatgggactgccattctactgcagactacaacaacggaatggaaggttgaggatctagtgagtgtctgaaagaaggacctggagggatggaactgtgtaactgtgcatctggtttggtctgggtgctgtggtggtatcattgaggcttctcaaaggaagctgtgctgaggctgaggcatcaagaatgaggagtcagccaggcaaagttgtaggggagcagggcatgtgccaagatcccaagtggaagagagtgtgagatggggaagcggggccaaggctgagagaggagactggtgctcagcaggggccagatcatgttggcttgggcatgttactgaaatgccaggggtttggtctaggtcctgttgcttgctacacagaaagccaaccaccaagacaacgaatgaagccaacaaagacggctttattcaggtgtcatcagcccaggagacagatcagtcttaaattcatctttccccaatcaactaaaattgggggtttctacagtggaaaatgaatgtagctacatgcaggaaaataggaattaaggcaggtaagggagcagtcctgctgaatgaggggtctggcatctcattgtctgcatgtggtgacctggtgagtttcagttcctcgacattatctgggaggcctgagggtcagtttcctgagaaaggaactcagataaaacaaatgtcagtttcaagctttaagactgggagcattaatttccatgttaattaaaaaatacataaacataaattctatagggaaattgggccagtttcagggggactgccctaaagaatttggactttctcttatgggttgcatcacacatctgaagagttttcagtagggacatgatcaatctgtgttttaagtacaggatgctaagggttgtgagaggaatggattggatgagtccaaaagttaaggaaagaaaagcagtcaccctgctgttcccctgaccccctcccctgcacctgccatacccagcacagcgcctgacacacatgtagagtaaattaatatgtacatatccactacaagagatggacgcgctaggcataacagatgtctgtatctgaaatgtgggttgttcttttatatcgcctgccactgtgcagttccctctacctgaaatttcagctcttctctgtaggtgctggaaaactcccgtccattcattaagatgctactcaaatcccacctacacaccttatcttctctaatccttagagcagccatatgaggcaaatgttttatctccactttacagttgaggaagtggctcagaaagattaaggacttgcccagtgacacatagtggtgtcttgggatttacagctgggtcttgtcgtcttcatacttgctttacccgccactcttcaaggttcctggaagcatgagtgattaaggaggaatcattgccagttcggtgtcattgctgccagccccctctgaggcacacctggctccctgggagtgtgtttatgctctgccaggactctccccagcctgcattctgaagcatctccttccttgctctgccacatccccgcccctctagatggagggaaacactcctgtaaatgggaattcacccaatagttcatccaaacatatcactggcttcctacctttctctccttcccagcctggacaacccatagcctccatgatcaatcactttatgaacatggtcagcttcaccatggcctctcctgggctggctgctaggctggcctaacagctgcagctggactctaccctgggcattttaaaacactgttacctctgtttctttgatattctctgaggtctaaagtcagcatacatcacttctcctgcttgtttgggttctgtatgtaggggcttgacagccagagtggctttgcagaaactcatgcccctggcccacccagcctctcgccctgcctggagggcagattacccctcagtgtgcttctgctaggaatggccatactgcatcattcctgttcctctgtctatgacttctgcaggatgactctggctttttctgggtacgtgcggaacactgggccaggctaataagtttagaagaagatttaagactccagatcaaggcacaggatcacattgtctcagtaatcgtgacttgaaaggaccctcgatgggcctcagctaagagctggcatggtggtggtgagcatgcgggcagtgggtttgcaggcatagcacaggctgtggctggataaaaaggtgttcacaccatcattgacaaattttctgaaccatgtggaacacttgtaatgatctgaactgtgtttctctccattttcttttcctttttatcttttcgctctctttcttttttcttcctggaatgcagctgtcacaataattggaagatgcccttgaaaaagtgctctcgagcctgtgattccctggcagcttcatttttcatctttccaatgaaggtggcatttgcccagaccctgttagctatgaggctgcctgtagaaccttcaactaccattgtgtgtggtgaatagtactggggttttggcatttcagtgctttgaactgctgaagaaccctaaagccaggctcatatgcacctctcctccctctctcccacctccccttgcttcctttccgcccctcccctcactccctggttcttccaccccaggacccacctttgctcaaggcaacccctcccaccccatggtgttcccctcctctttcctggaggccttgtaaatgtacagaccatttagactttaagacagtggggccacttttcatctcaggccaggctgctgcctggttttacggggtcataaaagtcctgacaggagtcataaaagcctccaattgcactgcagaaacccttggagtatattttaagggcccctgagttttcattttgctgcttttatggggactcgtaaaagctgcgtggagtgagcccactgattggctgctcagcacggaggtagttaaaattacagctttagacaaattgttccagtcccaataaatcagtatccggcatgtggcagggggaaggcttctagctctgctgcatcctgggccccccttgtcctaccacacaggcaaggctctgcttggggccaccctggccagccctccaccatttcctgaagccattctttgcaaaggggatagtacttaaccagctgtttttatgcattttaccacgtagctggttgacttttttttaaatttccaaaaacctgatctttaaaaccagattgacttatttttcaattcaattgttagagagacacaatctcatactccgtcggtcaccctggccacaggtactacagactacagcctgctttctccccattggtccccacatcccatctccctatacatggccttcttgccttaccttctttctactgttgccttggtatatctgttatacccctacagtgggccagtgcagggcaagaatgatcggtggggatgccattctcaggacccatcctaatttcccactggttatgcctggcagagaaccataccagcgtgggtattatgggagactgctgtgttttgtgccatttcaactttttaggagcttgtggctcaaatatatcaccagtctggcggatttccaagacactgattggagaagcagacattgttttctcttcccttctttccagatccagaatcactcagccccagctgaactgccatgctgacaacctgaggatcaagcatactcttcatttgtgatgtggaagtttaaccattaccatcgtgtgtgctcttccttcgcaggtggagaaagctttcaggagaggctctgagggtgcagaagcaaggaggggtccctgcaatgtgctactcctgtttgtgtgtccgcctctgttcccatggcaaccacctctttcccttgctatttctaaaaagcacgtgtgcttgtgggagtaccattctgaaaaaaatgatgcttactcctccctttctggatcttagccaagtcaataattcaagcagcacgaggtatcttagtacttgagcaatgcccgactgatgtcaactgttaggagagccaactgaagtagggagaacagtttggggtaagaaaggaagaaaagaaggtactgtcaagctgtgggttaggagaaggcattagcctgagaaataagaccaagatacatgtgaggaagactccaccaccattagttcactttcagagtcatggctggtagatgctcccttccttccagagcagggaggaaaagggacgcagtctttgctgcaaatttcctgcataagttagtggagaaaacaggttctcttctgacatatgcctctgttttgaagagccttgttcttttcttaaataaatgaaccaatcacaaaggttacaggctatgtgagagaaaaacacatcttatttctgtcttgctctagttttatataattattatatcaactgtggctgatcaaagcattcattaaagagaaactatctctcccatgcttttgttacagtttggagagatttgacaggctttatacatctctggctatatttccctttctctttttcacggttgatttcgctcttcttcctctcctcctccccttcctgcgtactagtgatttctaacatgactttttttcttttctttttcttttttccccttccacctagcctaatcaaatctctcataagacatcaagggaaccctgaaccaaagcaactcttggagttatatcggtacattcaggtgagcacaggctgacttcctgcctcagagcagccctcagcccacctggaagccaggcaaggcttctactgcacacactcccagacagtccctgcctttcccattgtctttctcaagggctctgatttctaggctgagcttactgccctgttccaatagcctcctcccaaagataggcacatatctgacactcctttgtcaatccttgggggagttctgtggccagcaaaagatttccatatcatcaactccttgtctctttgcaaacgctcatctttcaatgtggtttttgctactccttctttcattatcctcatgctattcttcctgaggaggttgtttcagtttatttaccataagcatgttcccaaggggatttcagccatgcaaatgaattacggaggatatgacttcaatgtgcaaagcatttggggtgaatgtgtacaagtacatttttcatattatgtgcccctctatcccattgtgtggcatgattttatctcactctgttctggactaatgacagactccttcagacatttataaaagtctgctttgatcgttcctctatatttcatcttgcatttatttgttcactccctcaacacacaaagcatagactatgtgctgagtaccatgctggtaccaggggacatggagataaataagaaatagtctctgtcatcttggaattcataaacaaatagaacaggaaaaaatgtaatcaattacttactaaacactgtggaatatgcaatgatatatcaggaggaagtaagggtaagaaatgactttttactggcgtttatcttacctggatttttctcaggaggaaagaataaggaaagggcattccaggtagataaagcgaagtaggaaattcccagaaacatagaacagcgtggtatgtgtgtagcattcatagtcatctgccaaagaagaataggtgggaaaggtcttgagcagaaaagagtctgaagaggaatccaggaagcatattgtgaggagcgtttgttttgcaggttgcaaaacatgagtttgaggttgctaaagaaaaaaagcggcattgtatgattccatatcaaagtagggcattgtggtccctttaagtttagcaaatactgaatgcctgctgtgtacaagagtatactgggtgtagaagaaatacaaagatgatgcaaagatggtatcttagtaccactttttaaggataagaaattttcttgtatacatagggcataaacatatataaaggctgatttatagtaagctgttgtgtgaggccattctggcattactataaagatatacctgaaattggataatgtataaagaaaagaggtttaattggctcctgtttcttcaggctgtacaggaagcaaagcatggcaccggcatctgcttggcttctggggaggcctcaggaagctttcaaccatggcaaaaggtaaaggggaagcaagtatctccacatggtgagagaggaagcaggagagagagggtggggaggaggtaccataccccaacaacagatctcatgaggacagcccgaagctctgagggatctccccccattacccaaacatctcccaccaggccctatgccaaacactggggattgtaattcagcataagatttggcagggacatgtattcaaactatatcatgcatatacacacagacaggcacacacacacacacacacacacatacacacaatcggtcaacagtgtaaaatgagatgacaaaaccatacttgagcaattgccaaatgatattaaggacaaacaatgatggatgtagaggagagtgtaattagacaggtatggatggccaaggaaagctgcagagaggaggcgaatgagtggataaggagaatgggtaagatatggagaggtgaagcctcatgtgtagaaaaacttgaataaaagcaatggcagggacagccaaagaggaatcagaatcagttaatgaattaggctcacaggggtggagagttgatgctgtccatggcaaccggggctggaaattatgctgcctgaagagggtggaggctcttcaaatgtccgattaaaggtattggacttttctccattggcaacagagagtcactgaaggttttgaatagggaagtgacttggtatttggctggacttgtcttgtgagctatttgtggcagctttactgtacaaaagcgatgaaatttaataattatttagttatttggaacattaatatgctggtgtatcatatattttaataagaattcagaaatgggagttttctaataagcaactgagttgggaaggtaacagaaggggaaattttggttgaataggataagaatgagaattttgagtgtcagtgatcaacaattaaccctacgtctcaattcatcataagcaaatacaattactactctgcaaatactatgtagaagaatgaaatgatgtgttggtgtctgtcccccaaattggaggcttctggccattgcttgaataactttctgcctctagtatccccaaacttatgttttgttttttctttttctcttagtatccatgcttctcctgaatcattcctctcgttaggaatgtcagtctactaaattttgtggcaatacaatgcctgggtttgaattcaagttctgccacttccttactctgtctctttatcaataaactcattgggaaaagtggaggaaatcatagtaacgatttattaaagttgaagattgagttttatacatttaaagtcctagaacaaagcctgcacatagcaagctcttagccaatgttagcagccattattactgtttactgttaataacagaaattactattaaaaaagaggaaacaggaaaaacctttgtcttcaagaagcttttactgtccgcctgtcaaagttcctgagcagcagctgatttctggcttagaagttagggttaggaaagtaactagtgagcgcactaaacagtaagatgcgctgccacagttgtgtgtgtaattgacttttatagtcaattctgcttatatttcctccttcaccctaatgctagcccggttctgagccagagttatttcgctctgccagtggtgcacttcagaaacacctggaggcttgttgaatccggattcctccacccacacccttagagtttttttttcttttttttttttgacaggttatttgttgcccaggttggagtgcagtgacgcaatcacagcttactgcagcctcaacctcctgggctcaaatgatcctcacacctcagcctccctagtagctgggaccacaggtgtgcaccactatgtctggctaatttttaaattttatgtagagacagactgtccttatatttcccaggctgctcttgagttcctgggctcaagcgatccttctggctcagacctccaatgtgctgggattataagcattagccactgcgcctggcccatgatttgcatttttaacaagttcctgggtaaaactgatccttgtggtctggggaccacactttgagaatgtgctttcagctcagctctgttgttcactcaagaagaaaaggcttttcctggtaggtctgtctgtagctcaatcacatgtcccacatggagcccactctttcccatggtacaaaaccctccttaattgcctccttggaatctacacagagaaatccctgagctttactttttctggacctgccacttacagaaccagcttcattgagatgttgtttaaaattgatttctcacctagccacacagattatctaaaaggtcaagattctcatgtagacttctttttgaacattctttagccactcgatggcccagagccccatcctcattgttcaggtttcatcgtctccttaatcaaccattagcataatgtattagcatatctatagcacaattatattttgattgctgtggtcccagtcagactaaaggctgccttcaacctagatataaataatttagaatgtttataccaaagggaattataggggagggaagggaagaaaggaaagagaatatttgtgtgtgtcaggggaatgaggggggcattgggagagtaaagatggtggcaaaaggtaacttaggttgccactttttaccacaacacttttctaggctattctcaataagaaaatgtgaattatatatattcaaaatacagataccattttgaattgctttaaatccactcctgcctttaatctcattacatctgtcaaaatatgtctcatttactaagtaaaaagtagaagctggtttccagcacctctttctttattatagcctgatccctgtgcaaatgcattttcctgtggttcatctttgaaagatctctcttctcttgtctggttaacttcctcaatgaccattgatatctttgtgctactttattgtccacttggaaacctgatttccctttattagtgtcctctgtaataggttagcagaaatcttatatggttccaaagaagtttctctctctttctctctttctctctctctctctctctctctctctctcacacacacacacacacacaacacacacacacacacatagacacatacacaggtgcattgtatcagctggaacatcagcatatgtgtggtaggatcacaatcattcagagcttctgatgttcatggtacctaggggattgattcagctttcaaggagctgtggacagtaagattaaaagaactgctctccttggggacttttaagtaatgacattattggtagtcctttgagcagcatggagagatgtttgaaatatgaaattgctgacagttttaatagttgcatttagaatggatgatatttgcaaaaattgctacttctttaccttaccacgcagaatgacaacgggatgctaggactaagccaacttcagtattcttctgcaagtgatgtgaaaacgttatagttgatggctcaggatcagtgcagggatggtaaaggggcagaggatggcactatgaaatcatagtattgacacagctggtcattagattaagcctagtaagggagtctaaaaaaatatcactctccaggtcccatgcatggagattgtcattctgcacctctggggatggaatcccatcagctgagtgtgatagctggccagaattgagtagtttgggtttagatggtgtcagaaagactggagaataaatcttctcttgggtgatgaatatctacaaaaccttaggtaagacacattttctgagtctcagtttccttattctgtggacattgtctttactggatggtagacgacttgaaggcaggagctctgttttctctttgtcatcagctacttgcattgtggcagacagatagatagtaggaccctagttaaatggtttggaataaatgattgaatgagtgaaagatgaatgaatgaatgttggaaggaagggatatatgaatgatatctcatcaatttgttgtgtgtattaaatgaggtaattttatgtattactcctgacagatagtggggattctaagaagtttccatctcccttttccattttcatatcctaccatccaacatgctaattgtgtggtgttgttttcatatttctatctcttccttttctctttttgagagaggaaagaggtgctcagtccttattcctcccattttctgtttcacctgcatctgcccacagcagtttccttagcatacattattagctcacctagacttaacaaactacctttctaactcaaatccctcctgtttccctaaagaaaatgcttcttttttgttagaaaattttaaaacaacaataacctaggttttgaagaaataaaaggtaaagattttaaccacatttgcgtgtttcaattattagtgttttccctgtggcccattcatgtggataagagacatctctgcattattatcttgtcagaaatacagcccctttcccttcccctcatctgattaggcatgcttctctttggaagcctcatcccatttggctaatgcatcttgacaactcctttaataagagtgcttggtgttcgcattcaaggatgtgtaggagttgacagaaatctaccttgtaatctttccatggcttgaaaataaaacccagggagacctagcacccgcatctctcaactcaaaaatggcgagaaagcttgaggggagagggatggccattgatttaacagaaacagttttatttgtttgtggtttttttcccttccttctgtgtgaaaaagctagcagagggagggaaaatttgggaagcagaaaatgtttcaatctacataaaaaagaggaaaataataacccaacaatgagaagagccaagagaatatgagaaggcagcctctttttgaaatagattaaaggctttattgcaagaacatcgtaggacaaaggtgtctctgcaggactgggaacttcagcaaagcacataaaacctcattctcagacttaaagacagccctggaagaggcagtccacaaagcagtgtgtgcctaggcacctattctaaattcaggagagctctgcagtcatttcctttgggggtgaggcttatgaggctggtgtaatcagggatataactaggaatctcctccaaagaatgagtgtagaccaggtcaaacagaactattgtgatgcatttgtcctccacagtatcaggatctcaagccccttgtcctctgtggttatagaatagcctggggcaccactgtgggcctatggtgatcatgggtgccacttcctgagcacttcctgtggtaggattgtacttcctcctttgtggagaagaacattgactagtgctggccaatgagaggcagctacaaatgacgtgtgtcaccctgtgggtgggctaaacattttacttccagtgcgagaccctcctgggcactctctttcctctgtcatgacatccagtgactttcaagactgtgactgccccactgggggttcctgagtgaatggatgaaaaaagctcctccctgtcacacctgtgatggatgtctactgtgaatgagaaatagtcactgagactttcatgttgttgacgatttcggcataacctacttatcctgactgttacagagtctgatcttaatgcaaaacctagccaggaattgaaggcttttattcagtggccctttatttttgaaggtgaacattctacagggtagtttggataagtggcaataagggaatggtgctcattcatcccaggatcacttaagagcacaaataagaccgccagctgatgccaggctgcacagcaggacactaggtcactaggagagtcaggagggcataactcctgctgagcgttacgaagcacagcaacttgtgatttggggcctgtcaacagctatggactcagtaaacagccctgaaatgtgaggtttccaggcagatatttctgatgctctcttttgttgcagcctgctttgctttatttatgcaaagagtgtatccctgggggaaaaatcaagtcatatcataagtgcatcagagaagcttactatttaaagaaatctatggtgaatccttttgtgaaggaataatcatccacctgatttgcatttgctttgtgaattgtgtttgtgtatcaggttttatgagtttggggcacatcataattcagagcatcaaacatagagtccaacagagctggattttcatctcaggtcagctaaaacacaaagcttgcctttgtcctgggggacaaagtgaggggccaactgaggatgaattttttgcctagaaatctctgcaacttgagaatggaggtaaaaggtagatggtgagaataaccctggatggagttagagttgatataagggaggtcaaagaagggaagggctatgaggagtagaaaggaaaatgttaggtgggcgttgcttcgattttagaataagccttatactgtaacaaggaatttggggaaatacacctagtcctctgttcaggccccaaatgaagcaaggcaagagggggcacagtgtgactaagcagggaattggggttagctcttgactccactgtatggggatcatgacgtggtggactgttgtctaagacagatgagagaacaaacgctcactttacccctcgccacttatgggatgcatctctttggacaaggtttgcatttgtaaaattctattgtcctgactttaatctttctgagtcttggttttccatccatatgcttaaggtctttgtccctcctggcaggacttgtgtgaggatcaagagaccatgaatgtcaagtgcctaatatagctgacctcagataggactcaggaaattaaaactatcaatattgctgactatgtatttacttttttctaagattctgaatgttaaagcgttagtatagtgtggagtctatgacaggtttttatagatatttgtggaaagaatgaaccatctagtagcctaagaagtgtggggaatgaacaccagatgtgagtgctgaggggtttggagcctctgtctgtgaatcttatacctttcctccctggcattacaaatgctccccatttccccctgaaaacatgtctgtttcacagaatccacattgctcacaaagattaaaatcattttcaatgactccatggtttttgttttttttgtcctttctgtcttgccacatcaggttatctgaccgtttgatttcagcaactcaaagagctcttcatttttttcctttctttccttttttcttttccttttctttctttccttgttttcttttttttttttcctgttgtcagagccctaggagtttcttttccctttttaattaagagcgaatgaaggtaacaaaatgttttataactggagagaattcaccagcaggacaccaaggcagaaatccacatcctgaaagaaaggcaggcagacaccagatcagcgctgtggggaatgtgtcctgcacacactctgcttcccgctgactgatggtccagccctccctctgccatcagcctggaagctttacctctggcagaagtctccctgtcttttgttaggaaaagctacaattggaaacctgcttttctaaagcatttttaaacacacagtgtgctcccctgaaatacgcctgtgcctgcaagagtcctgtaagttaattcctgccacccagggaagtgtcctaattttccctgacttttactgacctactcctcattgtgtacctggctgtctttaagctgggggacagtttgagattggaacagcaaatttcatgggagagcctgtcagatgggtatgtatgtgccgatgtaaagccagattgagcctaagagaaagagtgtgagcagaagaaagggaataaaatcctactgcagacagtgatgtggaaagggatgtcgtttctggcactgacactgtgcctggtccagtgccctggctgtgccatcccggcagctctgaggctttctgacagtcctgagaatggagcacaagcccccagggacgtctttggagccctaattccggtgcactgctttcgtgcactctgttttgcacgccacacttggaagatggcattataagactgcttccaaggaaagcgtgcttttattaaactcctagaccaaattgcctccctgttgacctctttctttgtcatgagacgtgatgggttattacatttgtgattaaaaacatccgtcatcggtgtgttttgccttttcaattttgtaggaaggtgatcatgatgctggttctcagaggaacagaaggatggagaagagagaccatattttgtggtttaaggaacttgcccctcagagaaggttaccctttttttctgagttcactgctgaatgtgtggctcaaatggccgtggaaggtcactgagctgaccgaatacacgttatatcaattctgcacagcatgagtgaagaaaatggacagacaatttcttaagtcactagattgtagagatcaatacagataattttggaatttttagaaaatccaaacacttatcctcaccacggctgttcatgtaatacctcagcagcttcttgcttcatattagctttgatcttactctctatttggaactaagtgtttcagaaatgatttctccctcctataaaacatactgaacacagaactgagttcttcaaactcaacttatgtatgacaaagctatagccccagcttttagctcaccttggtaactccgatggtggagaagacaaggataaggatttcttttctctgaggctagactggtgaagttataggatgacagatacagtctaaaggtcagtccctggctgctcttcccagagaccctctgcctcataccttcccagcctctagtctccagtctgctcggacctctgctatacttctttgtgctagaagagtgatttggtcatgtctctcctctccttgagcaaaccttaatgaattttccctccaatggccagtcctgtcttatcttggcatttgaagctctttattaagtgaccatttctactgtctttttttttttcctccattctcttctgctaggctctaatatgaactctttacggcaactgatgctatcacagaaggacctcttgtacttgctccagtctggggacttggtcaggtgtctttctgtctccctgtaaagcgtttccactctgcatttttgcctatcacaattgtacagtttcctgaaggcacagctgtgtgctatctctcttaagaattccctgatggaagtatcatttattggtgccaagtgactgaggttatattcgcagctcttggacagggctcctagactccccttagtctcagttacttatctgtgtataaccactaagcacccttcatcttactcccataaaatgaaagtgacctgatatttacatgtcgatctcgtatgggcattatcacaatgtatgctctgtggcattgagttgttttcatacatgttaattataagcaccagcaagcatggaaccatttcttatatgattaatatcccttataacaattaggtctacaatttgtaaaatttgttccattaaatatgtgattgaagaactgaataaagtcacctctagtgaaaattctacttgatattgatactatgatttgaaaaataataaactgagaggggaactccttgacaacagtttactgcactgtttctaacatttaacttgaagtataaataaatggattttagcaaatcaacctctctttgaagttaactgaatgctaactgtgttctggaatgaaagggttcatgcatctctgttaagaaatggaaaacagataatggcagcggagtcaataaagtcagtgcctcatcttgaactgggtgagcggtccctaaacatttgttacgtagtttcttcagcagactgtttatgtctaatgtgttctttttttcttaaaagaaaaggatatttgcatttttgatttacaattttattacttactgtgtacctgacctttacaagcattatccaaattaattcttataacaattctatgacttagagttataatgcacattttaaagttgagaaaactaagggtgtaagtaagttggcctaggtcacacagctaagtgagctgtagagcaattattccaacccaagcccatctgattccaaaatttaggttctctctagtacctcaagtggtttctacatgtgctctacattttcctgcttcttggaatctgtgcatgctcattcctaagcttgtaataccttttccctattctgtatctcagaaggtgtccttctttattcccaatccctgttctctctcagtttggaagtaattgttcttttattgcaaattctcacagcacttagatttttatctcaaactctttaatgtaattaattgttttcatccatataatatagtcatgtgtacctttatgtaccacatcttcctttccacataggaagctccttgagggcagaagcgatgctctttgattcattttgtattcttcaagatggactagaacagcgtagtcaccttgtaaacctatgtggtggatagggtcggggaagaaaggaaaaagagggaaaaggaagagaggaagaaatcaaagaacgatagaagacagtatataattcagtgttaaattgtgtggttcagactaattataaattcctttaaaagaaatgcaattttattactttcaagaacataaagttaattaatggctaacaaaatgttatcaagtagctgtcttgtcattcccactgtaattaatcaatgcttttggaatgaaaaagtggacttaagcctagcccatctccagattattgagaattttaaattagcacagtctgaaataatgaggttatcgccaccccttggttaaacagacgtctgaagatgaaagcatatgatgataaagaagacgtataagaaatttctaaacatgttttttctctttagtggtactaataagggattccttaattgttaaagcgcatacaggaccttatttgccaaaaattgtagcacatttgcttagaattttgagttatttcttaattcctcttctcttgattaatttaatggctcattaattcattttttaaaaaagagaatctaaaaaggttatttagaacaagctaaatccatacacagtagtgaaggtgctgtagcccatcacagagtgggtgggaagaaggggctagaagaaggatctagaagtggtaggagaggatgcaggagccattcagaatacgcatcaggaagaggaagcactgctgagtagcctcaggtttctttcttaggtgacttttcggagaagattagggaatgtagagggatagagagatttgtgaggaagaatatggagttaattttggacttactgtgtttgggatgcttatgagatatctaattggaattgttcatggagcagttcacatacagatctgatgctcagaagtgagggttacttgaagataaccaattttcgaatcactgacatgtagtaaaggaagattttcacaaggggcagctgtgtgaagtcaacagagactagaacaaggaagggtaccatgaagattgaaggtaaggttcagaagaagttgaagaaattgttttgagaagtgatatccaaagaagtcagagaaccacttgaagagtggtgtcaagaaacctaaaagaaaagatttttaagaggggacctattaaataagaactgaaaagaagccgttaaatgttgtgcttagagagtcactgatgctggcagcttatcatcctagtggaaaggaagcctgactggagttggttgtgaaggaagaagtgagaaagtagcgatgtctgtcatagaccattctttaaagaaacatagcagttaaaagaggtagctagtggaggacttgggagaaacaaggagatttgggagtaaacagaatctagaaaagtggtggtaagatcagtcttgaacagggacagcaccaactcccctgctgagagaagagtggcatagtcctgaatgtttatgacttcaagatagatctgatgaagagttcagctcactatttcatttgtattagctttgtttaggcatattttatggaccataaaatttatccactttaagtgtacaattcaataatttttgtgttttttgttgatacatagtatttgttcatgtttatgtgatacatatgatattttgttacgtgtatagaatgtgtagtgatcaagttggggggtttaggatagccgtcacttgggtatttatcatttctgtgtgttgagaacatttcgagtggtatcttctagccatttcgaaatgtacagtacattgttgttaactatatttaccatacactgctattgaatattagaacttattcctatatcgtatgtccttattttttattcctatatccattagccaacctttcttcatacccttcctctccaccccttcacagccctcacatccttcggtaataatcattctactctctacctccgtgagatttttggctcccacatatgtgtgagaacctgtgatatttgtctttctgtgcctgacttatttcactgaacataatgacctccatgtcaaatgaaagacatgatttcatttgtttttatagctgaataatattctatctattctattttgtgtagatgccacattttctttatctattcatcagtcgatggacagttaggttggttccacatctttgctattgtgaacagtgctgcggtaaatgcgggtgcacagctatccctttgataaactggctttttctcctttgaataaatacccagtagtgggattgctggatcatatgatagttctatttttatttttctgataaatctttgtattgtttccatagtggtcgtactaatttacattcccaccagcagtatgtaagagttgccttttctctgctttctgcattattttttgtctttttgataataaccattctaacctgggtaagatgatatcttgttgtggttttgatttgcatttctcagatgatgagtgatgttgaccatttttttcatatacctgttaatcatttggatgtgttcttttgagaaatgtctattcagatcatttacccgctttttaagagaattacttgttttttttttttttttttttgctgttgagttaagttccttgtgtattctagattatttccttattggataaatagtttgcaaatactttctcccattccacaggtgtctcttcactctgttgattgtttctttggtagtgcagaagctttttggcttaatatggtcccatttgtctatttttgtttttgttgtctgtgcttttgagatcttagccatataattcttgtctagaccactgtcctggagtgtttcccccatgttttcttctagtagttttatagttttagttcttacatttaagtctttaatccattttgagatggttttttgatatgatgagtgatggggtctagtttcattcttctgcataggaatatccagtttttttcagcaccaattattgaacagtgtggtctttctccaatgtatgtttgtggcaactttgtcaaaaatcagttggccataaatgggtggatttatttctgagttctgtataatgctccattgaattatgtgtctgattttatgccaataccatgctgtttttgttactatagccttttaatatattttgagtccagtagcgtaatgcctctgctttgttctttttgctcaggattgccttggctattcaatatcttttttaaagttccatacaaattttaggatttttttttctatttctgtgaaaaatgccattggtgttttcgcagggattgcattgaatctgtagattgctttgggtagtatggtggttttaacagttttaattcatccaattcataggcatgggatacttttccatttgtttctgacatctttaacttttttttgtcagtgttttgtagttttccttgtagacgtcttttacctctgaagtaaaatttattcttagatattttattttattttattttattttattttattttatgcagctaatgtaagtgtgattgttttcttgatttcattttcagctagtgcattcctggtgtatagaaatgctactgatttttgtatgttgattttgtattatgcaactttactgaatttttaaatcagatctaataggttttttggtggcatctttaggtttttctaaatacaagatcatatcgtttgcaaagagggacagtttgacttcctccattccaatttagatgccttttatttctttctcttgcttgattgctctggctaggacttgcagcactatgttgaataggagtagtgaaagtgggtatcctagtcttgttccagttctgagaggaaaggctgtcagcttttctcattcagtatgatgttagatgtaggtttgtcatatatggtcttcgctgtgtttcttctctgcctgttgttgagagtttttttttttcacgcaagggtgttgaattttatcaaatgctttttctgcattattgaaatgatcatatggtttttgttctttgttttgttgatgtgatatattgcatttgttgatatcgtatgttgaacaatcaatgattttttaaagtgaatgtatagagttgtgtaagcatcaccacaacccagcttaggaacatttccatcaccccagaaagttcccttgtggctacccacagttaacctccatttctaaccccagccttaggcaaccactgatatgatttctgtatctataatccttttctggacacttatataaatagaatcatgcaatatgttgttttttgcatctgacttcttttcatgtttttcattttccttcttattgtgtaataatattctattataaaagtataacacattttgtttattaattcactagttgctagacatttaaatagcttccagatctgagttattatgaataatgctgctatgaacattcacctacatgtctttatgtgaacgtatgttttcatttacattgtggagatccctaggagtggaattgctaggtcatatattaagtttattttaactttgatagaaactgccaaccttttttccaaagtggttgtaacattttacatttccaccaacaatttatgagttttctgttttctctaaatccttaccaacacttgttactgtctttattttttattataaccattctagtggatatacaatgttatcttctagtggttttaatttgcattctgttaatgatgaatgactttgagaatcttttcacatgcttattactactcatgtatcttcttgtgtgaggtgtctattcaaatattttgattatttcttaattgagttgtttatcttcttatgttgtaagaatttttatatattctggacacaaatcctttattagctgtatgatttgcaaatatattttcccagtctctgagggcttttcttttcattttttaaatggtgggttttttttgaatcacaaaattttaattttgatgaaagtcagtttatcacttttttcttttacagatattttttactttgatatctaataattttacaatccaaagttatgaagatttttcttctacattttctcctagaaatatcacaatgttagttcatacatgtcgatctgctgtgtattttgggttttgtgtttgacatgaggaaagggtctacgctcattttattcacatggatgttcagtgtttctagattcatgtgttaaaaacagtctttttcctcactgagttgtcttaacacttttgacaaaattcagttgaccgtaaatgggattcatgactcttgatttgctcctgtgaatgggattaattttggaatctcaattttatgttattgatctaaatttctaactttgcatcaatatcacacattcttgattactgtaattttatagtaagtttgaaattggatagtgtaagtcctacaactttggttttcttttgttttagttttttctatatcttttgcatatctatatatagtttagaaacagactgtcaatttgtatcagcctgctgagattttaatagggattgcatttagtttatagatcaatttggagagaattgccatcatgatatattgagtctttaaatccatgaacatggaatgccttttcttttatttagatctgttttaatttcactacacagtattatgtagttttcagtgtaggcatttattgctgtttaatttttctcgatgccattgtgaatggaattatcttcatttcatgttcggcttgtttattgtcagtgtacagaaatacaatagacttttgtatgccaatgctctttcctgaaaccttgctaaattgtttactagttctaatagttttttgtgcactctttagaattttccatatccagagtgtatcacctgagaataaggacaattttatttctttattcaatccttttccttctttgtccctctctccctctgtctctctgtctctcttttcctccctctctcgtttcctgtctccctcccttccttcctgtcctttctccctccctcattcactgcctccttctctctttcttccttttgtcccatattgcatgggtagaacctctaatacagtgttgaaaagaagtgtcaaaattagacattcatgcctctttcttgatcatgggggaaaacatttagtctttcatcattgttgtatgatgttacttgtggatttttctaaggtaccttttgtaggattgaacctaatcctcttggttgagaaatttttattgttcattttaaatcatgaatgtgtgctaaatttttaaaaatgtttttctttgtcttttgagatgatcatgtggctttaaaaaatttattatatactatatttcattaattgatttttagatactaagtcaagctatcatttttgcaataagtcccacttagcatgggtgtatgatctgctttaaatattgttggattcagcttactaatgttttattaaagagttttgcatctatgtttatgagatatagtaatctgtatttttattccttatgtttttgggctttaatattggatgaccctagactcatgaaataagttgagaaattgtttgactttttctatattttggaagagtttgtgaagtattgacatgttttgtttttaaatatttggtagaattcacttccgaagtcacagaagcctggcttttctttgccgaagatttttcattgctaatttaaatgcttgatttagttttattcagattttctacttcttctggagtcatttttggaaatgtgtgtctttctaggaattttcacatttcatataaattatctaatttgtcggcataaggttgttaatagtatggtcttctaatctgttcatagtctgaaaacgtagagtctttactatttttcttctctctttttcctggttaatccaacaaaaaatgtgtcagttttatcaaggagcttacttcttgttttattgactttccctaatttttttgttttttttcattctcttatcattattatatcacttgttctgtttgatttgaatttagttttctattccagttttttagatgtaagcttaggttattggttgagatcttttgcctttttttaacatagacgtttacaggtataatgtcccttaagcaccgatttaactgcattccataaattttgaatatgtcaagttggttgatagtgttgctcaagacttgtggttctgttgtttcttgacagtggggtattgaaatctccaactttaaatggtgactagtctattttttctttcaattttgtcaggtttgcttgctgtattttgagattgtgcttttaggtatgcatacctatataagtattacatcctcctgatatatgaactcttttatcatactgaaatatcccagcttgtctttgaaatagttctagtcttaaagtttatttttttctggtattaaaaaaatttcctttccaatttacatgccttctttcttatggttactgtttgcatggtatatatattcatcctgttacttttaacctctttttagctttgaatctaacatgtagaaacctgagattattaaatattttagatttttagatagcttataagaaattggatcttactttttttatccaatctgacaatctttgcctttattttattttatttttgtttctatttatttggtttttttttcagggggtacatgtgcaggtttgttacaaagggatcttgcctgacgctgaggtttggaatatgattgaatctctcacctgcatagtgtgtatagtacctgacaggtagttattcaatcctgtactcctcccctccttatattcccccatgtctattattcccatctttatgtccatatttacccagtgtttaactcctgattataagtgagaataggcaatatttgattttcagtttttgtgttagttcacttagggcaatggcttccaactgcatctatgttgctgcaaaggatatgattgccttccttttttatggctgcgtagtattccatggtttatatgtaccacattttctttatccaatctaccactgatgggcacctgggctgattctgtgtctttaccattgtgaataacactaatatctgccttttcattgtgatatttatattattcatatttactggtacttatttttatgactggatttacatttgacattttgctatttgatttctgtgtgatttctctttttaagttcctctatttcttttacattgtcttattttgtattaaataaatatagataaatattatagtgtaccatttaattattgtattaatattttgtctatttgagttaatgtttagtggtaactctaatgagtatgctacacattttagcttatcacaatctactttagattgatagtaactaaattctggtaaaatgtggaaaatgtctgaatttatccctcatatttgaaaaaaaaggtttttctgaaaactaaatttccggttaatagtattttattttccttttggtacttgaatatatgttatcccattgccttggccttcattatttcagatgtgaggtcacagccatcttaaacttctcagtgttcccctataatttttttggatggctatcaattaatttttcttatatggttgttttatttttttctttggttccaaaagttggatgattatatgtcaaggtgtggctctttttgtagttatcctaccttggatttgtagagttttttagatatctagattagtgtttttaatcaaatttgggaagttttcactattattcattgagtgtattttttgcttcctctttgctctccttatgggattcccattattatatatgctggcactctgaggctttgtttatttttcttctgtcttttttcccctctttttccaactgggtaatttatatggatttatttctacattcatggattctttcttctgtcatctcgaatctgctgttgggtcctccagtgagattttaattttctcattgtactttttgtttccataatttgcatttggttctctttatacttttgtttcctttgttagactctctacatatggatttttttgttgtcatatattcctttaatttcaaaaacatggttttctttagttttttaaacatatttataagaatggcttgaaatttcagctggtaaattcaacatctggggacaatcagagagtttctattgcctactttgttttgtatgggtcacagtttcctctttccttgcatatctcatactttttttaagtgcacgttttagaaaatatattttagcaaatattcctagcctcacttttcccgcaaaggttgtattttgctgtttttttctgtttatgtctttccttgtttagcaaactggctaatctgtggactctgtcttctttgctatgcatgaacagtcactaatgtcttagggattttttgatgtttttaaattttctttaattttatatcctgttttaattttcaagtctctcttcccataggttgccccccaggactgagttgacatccaaggcttaaacagaagttgtgctcaaccatcttgagccagttagtccccttctgatagatttgtgtatgggtagtgaagcaccttcaaagtgcggaccatttccaatgtctcctgatatttgcttcctactgagtcctgtcatgtcctttctgctcaggtttccagcttcagtgtcaactaagaatataggcctgacttgagccctctccaggctatggtgtgtttgcatgcagatttgtacttgcctagccctgagcagaacctggggtagtcattggccctcccctctagcctttgagagaatgacttctaccaacagtgccactggctgtggtgtcactcaccattcaaagtaagtgagcctctgaaccagggcagagatgccactggtcctcaggtattaccctaccctggaggaacctccatgactgagctggggctggagtcagaataccacagagccccacagttcttaaccgaagttcagaagtttcacaagaacatatgcttctcagattgttaagatttcgttcaattaccactccactggaatggttgattttgtcaattttgctcgactttatgctctgttttcttggacagaatatttgacagtcttctttctttgccataacagaagtcactggtctttatttagcactgttctcagacatttatatttgtagctttgggtgatgtttcttcagagtccgcatgatattcgttatcacagctctctaaatttgtaagtacactcttagtcccacgtggccctgcaaaggacactacccactctttgcgagttcccttgtgctcaactaagagccctctaacacttaggtccctagatcctacctctgactgtgaagtaaattacaagttcatgtttgttgaatataataatgtcaaaagacagtccctaatccatgcttctcttgaattccctggttaaactcaggggaaacattccacagacagctttatccctgaagttgtcatgtggactagatacctgtaactgcatggaatcaagtacagcaggaggaatctaagaaaatgtgcactgtggtcctttaagatttgaaagatgcaattcaaaggctgttaagaccttcagctggtgataattggatttgtaagtcagtgcaacatgtgataaaaatgctcctgctggatgggatcccggttttcttctatccttcctattaatgtgataaatgttactgtctcagctgatagggccacgttggctaatcagattggaatcaagtttgagttcctcaggctggctccatgtgaagctcatgggaagatgttaaaaaaatactatagagaatacaaggaggacctgggtttgcagaggggaaaattttactttgattaggaggctttgcagcgtggggaagacacatttaccatagaccctagtcacgtgctgccgcctgggcatgttatatctcatgggggactgtgggacattatctccattgttactgggcacatgccatcgtggagcctggggagaaaacaacagcagctctccatgtgggttttggggcagagaggagccaaaataatgttggaaaattaaacctctcttaattaaagctgatggcaaacaaacacaagtaataatgcactacagctgggaagcacaagttcaatatgaagctgaacagctgtgaaattgagccttctggtcacagctgggcctgtgagaaggccagaaaccctggcaaaggtgttgaccctggctgcagggctggcggggctagggtgggcagccagagtggcttgctctcctggttgttttggagtttgcgcccgctccagtgtctagctctctttgcatttccagactccttctcaccaagagcacccctctgtccgataggattattcagggttcttctcgaagtgaacagcgttattgcaagcactagaattgaggggatagagggaagatatgctttgttgttgttgttggttttgttgttgttgttggttttgttgttggtggtggttttgttgttggtggtggttttgttgttgttggtggttttgttgttggtggtggtggttttgttgttgttgttgttgttgttgttgagatggagtctcactctgtcgcccaggctggagtgcagtggcgcgatctcggctcactgcaacctccacctcctgggttcaagcaattctcctgcctcagcctcccgagtagctgggactacaggtgtgtgccaccatgcccagctaatttttttgtatttttagtagagatggggtttcaccatgttagccaggaggtctcgatctcctgacctcgtgatccgcccacctcgggctccccaagtgctgggattacaggtgtgagctactgcacccagcattttttttttaatgtaataaatttcccacagagagggaaggaggatagggtatgtttgttttgtgtttttaaaattgtttgctctctgcatttccccaaagacatccaggctgtgcctttaccgtcagcttgtttctttggtcagtgtctgccactgtgttcctgacctacagacttgaaaggcttgtgcagttgtcctggccttcagtatctgaggggcactggttccaggatttccctccaatattaaaatctgcagatgctcaaaccccttacctaaaatcggaaattatttgtagaaaatctatgcatatccttctgtatacttttagtcaactatagattacttataatggctaatacaatgcaaatgctatataaatttttactgtattgttttggatttttttgttggttttgtttttgaatagtttcgatccccagttggttgaatctatgcatttggaacccgtggataaggagggccagtcatatagggcaaatgtgggactggcttctctctaaagagagggataaagtacacctcagatgcgcagatacagtctggctgcagttacactgggataggtatattccggactttccctgaagttgtcaacttctgactcagtcacattcttgacctctgagcatgtagctatcactttcacttgcatattagccttagtcctcttactcatttgtctgtcagatttagttgttctctgtggaggttaggaacacacaccgactacaggcactgagtgtcaggattgtcaggatggactagactatgctgtggaaacaaatacaccctgagatcctagtggcttcatgcgataaagtgaattactagtctccttattgcctggagtaggttgcacagacccacagaatgtctctccactgactggagactcctgtgtctgaattccttccctcgtgtggcaccagcaccttggagtcatgggattcagctacagaggggagagagagaggctagaaggctgagcagtggggtagcaggaaagattgagcaagatgtttcatgtccaggcctaggactggcctttctcttcatcttccattgtcatgtagtcattcacatgccgttgggctcacggtaagggaaattggagaaagaggtctgccatcctgtgtgcccagaatttggtgggcaggtggtcagtctgttctacattttagcagtctacccaattattgaagtcttagtgcctgggcttgaagggatctttggaagcaattttgtaattcttttatctgcacctaaaaccttagactagtgcttctcaaaatgtggtcctgggacttggcagtgagcatcacttgggaactagttagaaatgcacatactcgggccccatttctgacccattgtacgagaaattcttggggttgagtcaagggatccacttcaagcagccctctgatgctccctaaactttgagagccactgtcctagaccggcagttctcactccactgtgactacccactgggattgcctggggagctttggaatgttctgatagctgggtccatagccacagattcagaccgaattggccgggggtgtggcctgagctgaagatgagaagcattgccctagaatgattattgaggaatagcttttatcctgaagttctctgtgaaaatagatttcatatggctccattggcacttactaatcactcaaaggccatgggagcaattgattttcatgtcctaagcccttcccttccctttcaattggaagcaacctcccagctttgcataaagtacagacaaaatagagatttgggaacttagacatggaatcctgattctgtcactgactcatcacgtggccctgagtaagccaattaatttctctgtgtcgtgtgtctgtaaaacgggagtagtaacacttgcccacagatgttgccagcattatctaattaatgagcacagagtgtttgggaaatacaaagtactgtacaaatgctaatcattatgatgaatgcggtgcattttgcagatataaaagtgctgtgtatatgctcataattattataattattgctaataccgataatattcctactgctaatgtatttccctggcagtaagagcttagtgtattctttgggttaacatcttgccccgcatgatcaggaagtcttgctaagcagctgttaaatgcccctggctttccacctttcagaaaagtatcattcatcaggagtacaaatagtcacgtatgtaaaccatcctggggtccacttatatgagacatccctggctgtcaggtcactgccagatcatgttcaagaagctctttttaggttccagaggtacccagaatgtagagtcatctgctttttcttgtattttcatcagaggtattttttttccttctactggttttttatctacaatagctttgtcatctgctttcatatggtgctaaatgtgctgaagaaaattctagtgtgtgttggtgagtgttactaggttccaatgctgacaattcacagatattatctgcagcaattggtgttgagaacaagacaattatttttgctgtggttttgtttgttcagttttaacttgggttttgattggaggagaagtgttggggaaaggcaattgtttctctcttctcactttgcaagaagggaacggtattgaggattgtgggactggtttgaacaaagcaggcaggctagaaataaagagagcaaatagatgactttaggatgcagtcagcagttacaagaccattgtttctatcctcatgttccttctgtccttccgacacccatttcctggttattagatgtggacctctgtattttgtagaccttgtctacgctactgcttcctgaattattcatagcaaattgggcatgaaacttacaaaagaaactcatcctgagaattatcccaatttagtacaaggcttgaaaaacaaacaaaaagcagagtttactgactgtccataccatagatccctgatggtccaactcttgtctccatttcaaaagccctgatgatccttttccttttccccttttgtggccccacatgatatatgaaatttcaagtttctttgccttgggctggaactacaacaactgatgaatttgtgctgattgtcttatgctgatctgaatctctgattgatagaggaatccctgataaataaaaatggggaaataacgatcaatttatgtagatcagaatttcttaacgatatcattttcattttctctgaagaacatattttaacatttattgcaaggcaagtatcctggcaacaaattccctcaacttttgattgtctgagaaagtcttaatttctctttcacctttgacgaataattttgctggatacagaattctagattggtggttctttagttttaatactttaaatatttcactcgacgctcctcttcctgtatgcatggtttctgaagagaagtccaatgtaattcttatccttgcttctctattggtaagccctcttccccgaccctcagtttctcaagtttgcctgtctttgattttctgcagtttgaataagatatgcctaggtgtagttttttggtattttgattagtgttctctgagcatcctgaaactgttgtttggtttctgtcataaatttttggaaattctcagtcattattgcttcaaacattttttctgcttctttctcccatctacgtctagtaatcccattgcatgtatattacacttccttttgtagttggatattctgttccatttttttcagtttttctcttcaaatttcaggtttggaagattctattgatattcttcaggttcactggtttttccttggccatatccagtctattgatccatggcattcttcatttctgttgatttttttttttatttctaccatcttcttttgaattcttttttacagttttcattttctgcttacattccccatttgtccttgcaagttgtctgctttttccattagaactcttagcatattattcatagttactttaaatcctcaatctgataattccaacatctctgcgatatctgagcctgttctgatgcttactctgtttcttccagctggttttttttttttttttcgtcttatagtatgctggtggtacttttatctttaaagccagacatgatatactggggtaaaagaaactggagtaaatagatttttagtttaaagttttatgtttctggctagggatcaagctgtaattattgcttgttgtaactgtgtcagaggttaaagtttcctctggtgttcttgtttttgatttccctgttgtccctagaaatttattttcaaataccatctgagatacagaattctttcatttccattcccctcttgttatgatgagctactcctatggatgtgaccatgggtgtggggggagggaaatcttctatagagccatgagtaggcctcagtattttactaagcctgtgcccctgcgccgtgagcttcacaagtgtgtctcagggttgcttttcttcccccgctcaggtgagacaggaagtgtagaaggggctgcagttgggtattttcccttccctgcatcattaggctctggtaatataatttctattgagggcaggccttcataagaacaggatgcatgtgtcatatttcaaaatggctgcctttgctctccccctgctggatgcatgaggggatttttctttgatccttactgtgagaacctcctagggctcttgaacctcctagggctcctattgaagtgtggagtctcccaaagtctggagctctcatgttttgacccctaagacttgtgcacactgaacctccagcaactcatcagttccattttagtttttctatcctgatactggctcccgtagagggttgtatggttggttggtgtgggtttttttttttgttttgttttgtttttttgctactgggcttctgctcttataagttgtgattctctgtatccacctgtcttttccaatttaggggcagtgttttgctctgtgacatctctgaggatctcttttttttatttttattctttaagttttagggtacatgtgcacaatgtgcaggttagttacatatgtatacatgtgccatgttggtgtgctgcacccagtaactcgtcatttaacattagttatatctcctaaagctatccctcccccctccccccaccccacaacaggccccggtgtgtgatgttccccttcctgtgtccatgtgttctcattgttcagttcccacctatgagtgagaacatgcggtgtttggttttttgtccttgcgatagtttgctgagaatgatggtttccagcttcatccaagagttgttgactttcggtttggtcagctttttccttttcatgtgaaaagcatgatgatgatgactccagcctgtttaggtgctttaatggaagctggaaggtgtttgctccaataattatcacttaacaaattcagtccacatagtccatcagtcaaaaaataatcatatgggcctttagttgtgaaaaagtgggaaatagagtgaacatcggcttatagttactactatttgttcttattaatggacttttttgaaggaaaaataagaaaagcatataagggagggagtggaggaggtagtcagagacgaggagtgggtataaagtcatttctgcctgttattcatgaggaaagaattatcaggaccttcattaccagtcctcgtgtttacatagggcaggcttatttaggaggcatcagcagtgttccacatgaatgaatttgtcatataactaagctatcatcctttaaatggaacttaaaacattgcaatcctttttgatagagttctttttctaaaatatattattgttttgtcttattgagcaaaacatggagattatcatttgtcttattttgttactcaggtcattattgaaaacatcagtcacagagtgactctgttgtaatgtggagtaggtaactgaggccatctacacctaaacacactccctgtctggcttcataatgcctagcttagttacccctctcctcaaacactcctaaaacccctaccccacctactccacctaaaataaaattaaatttattaattactattttatttgtgtctaagctagtccaattatctcctaaaatcatctcgtatatcactttgtgatatacatacaacaattaggaaacccaaaccaaaacactgtgctgtaggatagggagaatggagcctattatttaattactcaccagactttatgcatgaaaatcgttttctggcctataggctaaaaagtaaatacatgcataatatgtcatttgtactgtggtgtactatggagaaaaataaaccatggccaggggcttaaatgggactagagatagaggtggtcttggaagccctctttgttaagataatatttaagtagagatctgaaggaagtgaagagggaagccatttggatattgtggagttggaagagggaacctcatatgccaaagccctgtggcaggagtatgctttggatcaggaaacttaagaagaagatatgattctgagaaagggaacaaaagcaggagtgagagtgagaaagggagaagaagcaggagatgagagcagagagatagtgggaagctagatcactgaattagtcagctagtgccacaatagtgctgcataaaactcatgggcttacaaaatagcattttttctcactttggacttgtaggttcgctgggaggactatagactgaaaattgggctcaggcttcttccacatatgttcattctggggcccagactgaggagccagcagctactcacccagacctggttgatggaacaccagggcgcaaaatgacaagctagccactcatgcacattgcaagcctcaatcctgtctacaaacatcgtgcaggccaaagcaaggcacagagccaagctccaaacacagtggtgggaaagtataccctgccaacagtaggaggggaaaagatatgtgaccagttattcaatctaccacacaaaccagaaagagtgtggtttttgacttttactcttagtgtgaacatctttaacttttactctttttgtaaagggaagtcattaagtcatattgatctgacaagtgacttgttcttttattttcaaagagtaactctgggaccatgagaatagactccaagggtcaagttggaggcaagaagaccagtaaggagactgttgccgtattccagatgagaggggatagtggctttgaccatggtgtaggagtggggatggtatgaaatagtcatcttctggatttgtttttcaggtagagtttcgagaattggttggtagattgggtgttggtatgagataaagagatgggtcaaggaggtcttcaaggtttttgggtggaatgatgagtagggaagactggatgaagttcaagtttgaaggttgagggcagggaatctggagttctactttcatcattaaggcttgagatacctcttaggctttgcgtacagataccaagtagtcagttgtatacatgaatctagtgctcaggacagaggtgcaggctggagacagggttgaatgaaaattgataatagacttagacatgtcttggatgttgaaaataatattttactcagtgagagagcatgatttatataatctcttatgtgtgaaagtctttaaatcttcttgttctcatctagtttttccctccaaaatgacatgctcaaaggccctcccactcattaatctttctccttctctatctctgtgtttcatttttaattggcatttttgaagactagtctttctttatttttattaatttattgatcaactgaagtctgtattatgactgctgaggttattaaaactgttctgaccaaagttctcacactctgcacacatcccaagtggactctatgctgctgactccaccactccatccctccgccactgaccatgcatccactactgtgttcaagccattccaccgcctgtctcttctgaagccctctcccactttggcttctgcaactctgctctcctggtcttgttttcttcctgctgttctgtgatgctctggctttgtctccttgtgcatgctttctctcctgtgctaaccccttatatgttggttctgtccttgacttgaagctcttagcccactctgtgggaagtctcatccattccttggattttcactgctgtttgggtataggagctgcacacttcattgtctctgaccctggcccctcccttgaatgtagtgaaagtatttccaactacatgtaggatatatccaagtcaatgttcagtgatacctcaatttcaacatatccaaaatgaaacatcctctggtgattggggaggtaagagccatcgctcttcctctgtgtcttagtgactaggaccttcttgtaggtgtcatactcaccaatccctactccaacatctgttcagctctgaattgtcttataatgctctagagtgggaagtcctccaagtcaccccttcaagttttcatttactcatactttaagatatctgattcaatcggtatctcctctaagaaggctcctctgggtttgtaactaggatacagcattcttccttggtattctgccaacattttattcacatctcatcatattatgttgatgttatgtgtatatatttttccctaacatcctaagttaaacttctccagggaagaatgctgtatttatcatctcaagtacctagatcagtgtctaacatttagtaggattttagtaaacatttttgagcttgacagaaaggattaatttggattaatgaacccaaccaaaggtaagtaaaggctcagatacagccatatatgcctggtcttctaaacctcatagctttacctctgggattcatagtaatgttgatccatgcaaaagctttttctttgtgcccactatacacagataatgagagcacgctcatggctgcgggcaagtagcactgcatgattgacatgagttctgacaactcctccgaaagagaaagtagcccaatcatccccagctagatgatgagtgtgtctcatgttattttcaggcaatgtaaggttttatttttgtcatgcaccaaatggacttggtgtcaggccgtcaaatgtctggcaatctgcctagctgaagagataacatgagtggtgaatagaacattattgtgtgataatgatttccagcagctattgaagataaattccaatgcaaagtagaaagctttatttccaggggaggagatattgatcctgtggccactgtaaatagaatgagaattgcaggtgtagacagaagtccagtcttgtcacaaacattgagatctgactagcagaaggaactgcctcctgaaggcaaatgaaagcccacctgtttaggaattgctcgttgctccccctaatgctgtcactttcctgtaggaatgtaccatgtgaaccagatgcagcgtgagaagcatattaccaacacaattcttaaatgaaaaatcaaagacctctgcagatcagccataattggctgtggtatggtccctgggatctcgcttggttctttaagaaaaatgtttttatgagtcagagataaatccggagactggattacgggatttgttttatagacttaatggttgattgaaaaagaatctcatattctttatatacaatttgagattgatgatgtggttagtcttcattaggttttgacaaactggtcattacaacctgtctacttcatagaatattcagttttagaaagaccttaaagatcatctcatctaattcttttatttttcatgaaggagacagtgaccttaagatggtcttatagttaacttggacacttttttgaggcattatcaaaatacatgactttcttaaaccttactaggattgtgcattaatgcaaagctgttttctttgggatagcacttatttcagaatgagaaaaatcttcccagagaccttgcaaatgcttcaaggtctgggaattctaactctctcttgtttcacaggctagtgcacatagtttatattccttctgtggataaatgtagactatctggtgctctcatctctttcctgcctgcccagagatcacctgctagtaggcactacccgtcctggattgcctcaccacgatttgcttcacccgtctcaggggtgtcctgaacttcagtgtgacaaacttcaggatgtatgttaagtgcatctgtgcacctcttagtgaaggacatttgcaggatgttggagatctgtggctggaagattagcaggtcagaagctagctcaagtgggcaactggatagtggcagatgggtttacattcaatccagatgaaatcccagagggcatttgggttaaccctcagcaatggctggatggtaactctgtcgtgtttctccacctttgacacctagttttgccatcagatggttgtgagtttagggacaaaggaacctggagagaggagtagactttctttttctctcctcagagtctcagagaaatgacctccctgctcctgcaatggactatgccccactttaactgtgccgaggctggatgctttgccaaaggctttccttgtttgttccattgatgaccacagttctccagatcttgacctagttgctaaatccctgtgctgatcaaaaatgttcccactactgagggcagatgatatacattcatgatacaagcacataaactccagagggatagtgccaataggagcatatttctggtctcctagcatcttgattattcagttttaaacttgtttatgctcatatttctgatgtttttcttcccatggttttcattaacaaaaaataatctgttttgctgttgtttgctttgagtaactgagaggactgtggactgagagaaatttaaaatgttcctttctaaaaaaccgtacatgaacttgatattcaggctctcctagatgttcattttaatctataagaagctgtgtttatgattctgtcataccagagtgagtcccctcttttctctacttccatagctcttgttgtctgtaccagtcattggcaattaattatatactgccttgtggcatgataatttcagtttgtgtgtctttatatcattgatgtaagtggactcggatccttgagggagagaattgagtgtcatgcttctttgtttcctctctaacaccgagcagaatgctatatgcatagtcggctgtcaaacaatatttgctgaatgatccaccacacagaatttcttaatgcctctgcataatggtcccagagataatgttgcataaaaagagacaatattcttcccagtattaaaatattcggtgaaatgccacaatagtgatgtttcaaaggtctgcagattaaatgtttcagggaatgtaaattggctattgggctattggcatgtgtgtgtgtggcagtgggaggggtgtgtgtgtgtgtatgtgtgtgtgcccatgtacatgtgtaatgttcctgtgtgcgtgagccccattgctttcatcttgaattttggagccctctgtcagtccctctgattgaggaaggaggatgctggctgggtaatggatgtcttgctctagctggcaaggcagtaatgcttcaactggaaaatcattaaatcccagatttcagcctgtctctctgccacctctcatcagcagcaaatctgctttaacagctaagaattcccttatctctccgtgagtgtggaccatgtgctgctgctctctgtagatgggagatagagctgcatcattacgcgggggtgacaaggatgtaatttacaggctcaatcagttctagttaccatgtaattacagagttattacatggtcatttgttcctgatggacaccagtgatctcttatcctgttctactgtggtctgtttcttgtcttatgctactaaggatatttagtttcttctgcatggcgtgttaaatggtgtactagggaggaaggacagaaacgagttgggataagatgttgattatgctgtgatgctatttgttctcctcaattggcctggtgataataacagcatgctgtggctttcctcccctaggctccaagttcacattttcttcataagagagactggagacaatattgtacttggcagcatgggggaaattgggtgtaaggaatattctgacccattccactcagcgaggagatgacaatatcaaccccaagattatgtcactgcctcttgtaatttgaagctcatgttaatgcagtggctgttggagaaaaattcctttttataatgaaaaaggagagggaaccatttaagtgtgtaattcagtatcagggagaaatgatgagaaggttcagtaacctgcccaatgtcaccaagcgaatggtgtatctgggacacaaatgacagagcttggccccctccactctaactcatttcagtgaattcctgtcattaggaggcaacacacttttaatagcacaagtactggaaaccatgtggagaaatctgaatattccctcatatttgcttgaatgacctgggataagctcctttcttaactccttgtttttattaattaagaattgatgtgtgtgataccatgacacattctgaagatgtctaacataggtggattcctaatccttgggaaatggactgaagggccatgtgtcttgctattagaaagtgtggcatccatatggtgctgtgggtggtatcctggggtcagcactgaatgcacgtcaggagacctgagtcctgtctcagtgtttccactgagttgtgtgattcacagtctgctactctgcctgcttaggagtcagtttccttctccagatgctatagtttggatgtttgatctctgcaaacctctgctgaagtttgatccctgatgttggaggtagggcctaatagaaggtgtttggaccaccgggatggatccctcatgaatagattaatgcttcctcttggggggtgagtgagctcttgctctgttagttgctatgagatctgcttgtggaaaagagcctggtaagagagagggggagcccttctctctcttgcttcctctctcccctgtgatttctgcacatgccggctcccttcacctcagccatgaggggaagcagcctgaggccctcactgccacgcttcttgtgctgcctgcagtaccatgagccaaataaaccttttttcattataatccatcttgggtattcttttatagcaacactaaatggactgagacactggacaatagtcaaataggccagacaattgctgaagtcctctccagctgaccatcgtctgtgactccatgatttaagttgacctgcgagaagagtcagaaagcactgtggtatcattaaggctgaaaaacagaggtcatgggatgaggatattcagtgttgttatcagagaagcttcttcccactgggagccagaaaggtgcttgcatgccctctctgcatttcagttgatggaatgctgtgagtcattaacacgctctcctacttccctccaatgaaaacaccttgctgatttaattaaaatacatttttttcttcttttggatgtctttgaaaatggcactaattataacatagctgctatgtaactaatatgtgcaggtaatattgtgattatatatagacagccatatgctactatgcagccagtctcattgctgttaaactgctgaagcagataactccatgtccgtgcacacaaagtaattgcaccaaactaatttgtgtttgcaaacagatcctaaattaactatgtaaataggcagatctgcaaacaaaatattagaccgtgcatgtgtgcacacacatggggcagagaggaagtggtttttcacctgcttgaaagatgtcacaggactggggcttgcctgtggcatgtgttgccttgtgggcctcttggtcccacctagctcctgtcttgcattagtaagtctgagttattctgttccgacacaggtgactgaaggcaacctgaatttgttttctctaggggtaaagggttatcttgatcaatccacctttcttgatggtgctcgctgccctcatgcattctttgaccaaagatatttccaagacagctggccccggctgtgtgttgtatgtggagtggagatgttcttaatgcagagaagttcacgggtgtgattgaggacagtttggttcctcggcttgcaattgttagtgcccggaggagtgtgtgatcctttgagtctagcagggctgtttgaaatctggttccaccttgggcaagtcacatatcctttctaaggctcagtttccctgactgtaaagagggggtgagattggagtttcctcctggggctgtttagaggattaagtgagcaagtgtgcgtgtgtagcgtttagcacattggatccgtgttcagtcaacccttgctgctgttgctgcacttactgatgttgtcacccctggcagaccagcacgcttccctgtgggccctggcaacagtgtgctgactgcttgcatggatattccaggtgaggaggtcagcctcaaagaagaaagcccactttaatcaggcaagttgggccccaaaggacgtctcgcctgtctgccttcctcacgtccctgtgtccctccgtccctcctgcactcagcgtctccctctccttcagcgtggagcctgtggtctccacctccacaatgctctacttagacctctgctcttccatttcccaacatgcttcttgtgttgtaaaccttactctccccaggcttattctctcaagtcttgctccgtgtctgagtggttatttgagtgagggcaccagtcgggtacagcagccacactggtgtccatggggtgtttgtgccaggtaatccctctgtccagaacactctgcccagggagatgggtgaggcccggccctttgggctttgaggtctgtgctccaaccttgccttctccagcagcactgcctcccacccaattggaccgcagttggccccactcccactctccattcttcttaccctgtcctatttttcctttgtttcatagccaacctcaccttctaatattttgtgcgcttgacttatgtattgcttactgcctgttactccctgcttgcttgtaagttccttgaaagcagggccttttgttcattaatgtttgtcaaagatctcagcctgagtctgtgctaggaaggcccctcataattttttttttttttttttttttagaaagacagggtcttacaatgatgctcaggctggccttaaactcttaggctcaagcgattgctgtaattgtgaatctgtttcctgtctggattcttttgctttcactctcagaagccaacagacttcaatgggaaggacctgagggccaggaagaggagtggagaaaccttcgcagaggtggtcagaggacaagcaattcagggaccagatgaggctgggaacttaatgggcagagaggcccaaagggggcctgaactggaggaaacagaggcaggcaccaaggcaggtgtgtgggaataagacagcagcaggaatgtgcgagtcaactccatgctcatattgcagatgtaaccaagtgacttactttctctctctgcggcgcagtttccgcaccagtaaatcaccatgaaatctaccatattcacctcatcgagaatttgtgagcgtcaactaagataaccacctgaaagtcattcccaaagcagatattacttttttttttggagacagagtctcgctctgtcacccaggctggagtgcagtggcgtgatcttggctcactgcagcctctgcctcccaggttcaagcaattatcctgcctcagcctccctctggagtagctgggactacagatgcatgctaccacgtccagctaattttttgtgtttttattagagacgagatgggggtttcaccatgttgccccggctggtctcgaactctgagctcaggcagagttctgcctcccaaagtagtaggattccacccgcctctgcctcccaaagtagtaggattacagacgtgagccactttaaatattatagttgcttattattatttctgtttgtatctcagtttactagtctgggaaatgggccctagcaagaatggccattaactagaatggaggtaaagtgggaagtatgatggatatttctgaaggattctaagacaccattgaaagctgcatgcaccaagaaatggggcagtttgggtgacacatttcaggagaagagctttcactttcctcagcacacctgaaggcatttcttatttcattaacctaagattaggaacagccccatgacaaaaaatgttggcaatattgatatgaacaaataattaatcccaggtgctacctgctttctcccaggtccccctgtgatccttctccttatgctaaggggtcttgttcccactcccatccccaggcttagggagttgtggacaggacagtctattataacacttatagccattaaaatgtgagaacaaagcccgctctgctctcctgttttttaacctctttgctgaagcataacttctgtcaataggtgacctaattaacctgttcaagtcttgaggatttttatctgtgcatgttctttgatttcagattaggattctcaacatcagttcaccactagctagctatgtgaccatgaacaagttgcctgacactcaatgtccttattggtttaaaaaagggggtcatagctagctccacggtgttatgaagattaaattagttaatatttgcagaagtacctaagacaattcctggcatccagtagatgtccagtaaattttagttttgtcctttgttcctaaaataagcatgctggagtcttcaataccccacatttaaaaagaactgttgcagttacatttttctggattggaagctttctttgtgtgaaatacacgtatcacctgtacctttttgttatttttgctctgcctttttgtttgtgtgtgggtgtgtgtgtgtgagagagagagagagatagatagagagagagagagagagagagagagaaagtgagaagtggtttgttttggggatatcatttttgttcctttttgttgttgttttttaaatttgtaagcaaggtgatggaaaaaaccagaggagaagccaagtgtatctgaagacaagaatgtggaagtgaagaatgtttatgagactcactctaacatgctgatagcaaaggacttttgttcatcagattccctcacatgtattcagaattaaccttaagcacatttagtcagtcatacattttatttttgtctctgggcattaatgtgctgacttgtgggattattaaactataattccccaagatatatttctgtctctcagtgggtatgaacgtgcaatcattagcaaatccaatatttaggagtctttcttctctctccacggtaaatgggagcagaggaaggatcatggctgatgacagcatctgggtcagacagcccccagtactgctgagttgctgggcagtcctgaatgatagtggaatgactgtggcctttggaagcataagacatgaggcttgcttctggctctcacgtttactagcagtgtgactttcagcaagtcactgacccacactgaggcttagtttcctcataggtaaaatggggagaatacctgtcatattgagaaggtcaaataagtgtcatgtattagtatattaatgagctgtgaaacaatgactattgttatatgttgttagtggtgttgagttatcacttagatttccaacctgaggattgagtaccaggattgtaagctaattatcctgaaggcctggcattctattgaacttgttaaatttatgactgtgtattgttttaaatgagtaagcagtaggttgccacaatgtaatctcccttttatacttcaaattgcaggtgcatgtctacacgttttcctctagacccaaaatgaggaatgcatttgggtcagaatctagaggaggtgttttgctttgatcatagatgccaaatagcagcccctcgttcctgttctgtgagagctgtgccccatgtatcagtagaagaatggccccatttctagagcagctatggctactgggactggaaatgcccaagggatgtttatacttcctgctggtcaatcagatctttgtatgggctccagatgtgttgctgaagaggaaaaatttgaccaaacaaaaacaaaacaaaaagctgatgtgagcccaaccttttcaatgtcccagatgctgggattttccacagcatcactcttttcaatgagtgcctttaatgctatgctgaaatctccctggacacctccagtgaaaaggctctcgctgttgggcactgccattgtctgcctccaagaagacaaagagcctttgagcttagagctgggaacacaaaattgggtatgagatgggtcctgccatcagaagctcgcagacatcatggtcagaaatacctgttcacaatgttctgtcacagtcaagtattgtacagaccatataaggcagggtagaatagataggatacacaaagctagattacttttttaattaaacaattatttatgcaacatctgctatgacattgtatataatgtctgccatccccattacatcaaatctccataaagacagtatctcttgttcatcttatatccctggtttgtaggactctatctggtatatagttggtgcacaaaataaatattttagagccatatttcattttctgagcttattactgttgatttatgcctctgttacataagtggaagtatgaagaggccttgattaaagtggaatacattgtagaggcaggggcagttcttatgatgctgtagcataaaattgcaattgaggaatcctattccatcattctaatggccaagggatgggtagaagacattgctttttggtcgtagctgaggaatcctaggtttagtctcacattcttgctactgcttagctttggttagtctttctgcaagctcctacatggtcactaaggacctgagcttggttttaagatttgacctaattcttcatccttcaagcaatatgtgttctggttaatgagtttgtcagaagcaaaatgaacaattctaaccacctgtcccttaacaaaggccactttaacaaatgtgagccatgtgcatttcagctaagatgagggagggtgctttcagccaactgtcaagagctcatcaagccccttcctgcatcctctgtcactgtacaattattgaagtccagggagtagcaaagcaagagacctgggtgcacgttggccccacatggagccacagactctgactcagccagtttttacagattgttgatttgggttcagttatagtttctgcaagattggaaagtggtcacccgttatggctcttggccactgcttctgggtcatctcaagcacattattcaagtattctcttcagaatgagctggcagacgcaaacaagccacagcatcaggcttcatgggaagtctggggacttaccattgtcgagtagtatcaggtggtgtctggaggggagaggagagaggtaagattgaaaattcaaagaatacagagttttggtggtatgaaatatatcatctggaaaatgtcactttgtcctgagaaccattctcctggttaaagaaggcccaatcttgggataaatggcattactgccatctcagcattttaagaagacagacaccaactatgtgtgtgtgtgtgtgtgtgtgtgtgtgtgtgtgtatgggtatgtgtatgtgtgtgtatatatgtgtgtatgtgtgtatatgtgtatgggtatgtgtgtatgtgtgtgtatgtgtatgtgtttgtgtgtatgtgtgtatgtatatgtgtgtatgtgtatgtgtgtgtatatatgtgtgtgtgtatgtgcgtgtgtgtgtgtgtgtgcttatgtgcatgtgtatgtgtgtgtgttatcatttaaatgggtcttatgcactacctaccacaaggtcattctataacttgtggcacttcagtctcaataacctctgccaataacagggctcaagtgataataagtttgcctgtgtgactctttctttcatgcaaatataaggcatttgtatgttacggcttaccttttccctgcaatacctggaaatcagagtcagtgagacactgtgtgttttagagttgggaaatctgaggccaaaaagaaaaataaattgtagaattcagtagatgtgtctgttcaagaggaggacccctcttctgaatttcctcatccagtagcacctctttgtggatcttctcatgagtccatatattttcttatttccatgttcctgaggtggccgacaactgagggaagcaacaagctgccccattgctatcatgggtgtgataggaacgagcctccacattgggaccttcgccagtgcatgtcctctagtgacattttatccctgagctcccagtgcttttcccgagcacaactccatgggacactgcctagtggaagagaccacagcgggatgaaggaagaactagaaaatctagacgaaatggataaattcctggacacaggcaccctcccgagactgaaccaggaagaaattgaatccttgaatagaccaataacgagttctgaaattgagacagaaataaatagcctaccgaccaaaaaaagcctagcaccagacagattcacagctgatttccagaggtacaaagaagagatagtaccattcctattgaaaatattccaaaaaattgaaaagaaggggacttctccctaactcattatatgaggccagcattagcctgataccaaaatctggtagagatacaacaaaaaaagaaaatgtcaggccaatatccttgatgaacatcaatgcaaaaatcctcagtaacagcgttagtgtttcatatcaggctgtctgttgcgttctgtttattattgggatacagtgcttttgtgataagcagttacacatctctttgtacttgttaaagggttaagtgctggcagttctgggaggcaactgccatttaaaggaagtagaataaaagatgatgttgagaaggaagtgaaatggagaaggaagaggtcagaggaatgagggggagaagctgggagtaaaggagcctgcccttacaaatgtattggtaattaggctgtgctctttaaaaattaataacatttttcccattgattattctacatgtagagatatctgaagttattatttttgtgtattcccttatattcggcttcttttacaaacatactagtatggtcttccatgcaagtatttatttttcagacacaatatgaatggcaatttaatattctagttcatgattcatccaccattttcttaggtttaatccaaccagaaaggtacgggatatacttagctcccaaatatgagtacagctagatcagagacagggtttcctcaaagcacgtttctcagcatcagtcaatagcagcggggttgaggttttcctttctggactcttcctttttcccacggcacagcacgtgggacatggcagccatatatgtcggtgttcctggctgactttcttagagaccctggaactggtgacccttttctctgagctctttctgagcttcttccatctctggaaatctgtccgaggatctggagcagtgttgttttggatgggaaagtaaacaatgagtgaatactgctattctcgttctgcataggttgtgtgtaaaaatagagttgcttatataaagactccaaaatggaattttatctgtgcatttctgtgtcatcccttccccttttagactataaccatccaaactgtatgacctcgagtgagttactcaacatattcaagcctcaatttctgcaaaatggggataataatagtgcttacttcctaggatggtaatgaggattaaataagataagtaaagtaatatgcgtgaagtgctcagcacagactggaccagtgtgtgcacagctaatgctgacagttcatgctattttgtcattattgctatcatcctgagctcttccacaagacaaaccatattgtatttattttttgttgaaggcattcaatagatatttgttaaattgaactaactgttttaagtaaaaataaataagaaaaaggaaaagaaaaaaaaaaacccacccctttacataacaacacagcaattctactggccaatggggaaatcatacatctttactgctgtgagttattatactctctgaataaacataagcctttcatatgacctaatgattaatggcttatgcaaagaaattttaatgccattaataaaaaattaagcagcaagcttcccccacttttttgacagtgtcaggctttcacctgttctcctggggacaacaggtttccgggaacatgctgagtacagataatagatcattcccaggcgacactcccctgtgtgcctcatgtcttcctgggcagcatgtaggatggatacaaggcactctttagagaaaggcaaggggtctttgtggtgaggaacagagatcacagctgagcactggctttatctatctatctgtctgtctatctatctaactatctatctactgtttatctatctaccatatatctatcatctatttataaatcatcaatctatctgttatctatctatcacctggttattctctcatattgagtatttattctgtgtcaggaattacattaagatcttattcagtcctcatagcagccctaggaatttcaaagttaatctccgttttacccatggaaccctgggctcagagatcatttcctgttcatggtcatatggtgactgaaacacagatctgggattggaatgtaggtctgtctatttcccaagtgtttccttatccttctttgcctccatccagtcttctgtgcccccatgggctgggatctgacataggtatcattcattctaagaagaatgagcaggattctgacactgaatgctccagaagggaagtttatccttttaactaaatactctttcagtgttgaggtcaaatttcacacaaagtctccaggccagcctgatgctgaattctgaatatcccttatgaatattttgtcctattaactaaatagtctttcagtgttgaggtcaaatttcaagcaaaggctccaggccagcctgatgctgactcctgagtatctctcttgaatacattgtctctaagcctttggtcagctgtgcttccaattcaaatgccagttttcttcaaaggattgatctcagcacctcttatttattttgaagcaaaagctccacattttcaaaactgggattcctggtctgcgaggcaggggagtcagctagagcctggtcatcactggcattctgagcagatagcagcctcctagccatagctctgttcttgacccggtggccaggcagggcagtttgcaagctcagctacagacacatgccctccacaggcctccttcctcttaggccccactgtttttccacataacttttctgagtctgagagaagaaaactggttttctctaaatcaagagtagggtcctcatttaggaaagccagaattttctgtcttacgtatcatattacatccttgacctgtgtgagacctcctgttgaggtcaaagttgggtggacgacccgcttgacatctcagtgtggagctggattgcccttcaatccctaatgccctcactttctacccaacttagcatttcacttgtaattagttcctattaacttttttttttttatatagctgagtatgtctgcgtgtgtacatgggctcatgcttgcatgcctgctctgcttagctatgtttaaactgttagaaagaagagaccattccttttttatgtgtcttttggatgagctcaaaatctaggggtatatagaagaacttcagatcacactgctgcctgaccaatccctggggatcctctctgctgccaaatgtgaaggaacgcattgttagacagcaataccccccatgccgccacctcctccctcccttcagcggcaaagcagagcccaagagcctcctgcaaagagagaaaacagattatattttgtagtttgtaaagatctctgggtccacacgatcaatacatttctggtccctgtgtggggaattgttaagtcattctttagcaccaagaatagaggggccagtacttcctggggactaacaggacaaccatgacagccactgaagcttttcttgtgttcacctctggaaacaggaaaagaacagattcttctcacccttcagagtgcaaagggttctgcatttcttgtcataattccggagtctatctgaagccttgtgtgagaaagtagtgtgaacacggttgatgtttgtgtcaagatacaaccacagtggctcagggacccagaagttgagaatcccagcacaggtcagcctggtctcagcattctcattctgacatcctcaaaacagacagacacccccaaccaaaacccagcaatatcgacaacaagaacacaaaactaacaaaaacaccagaactacagagctgtttttcttttcttttttctttttttttttttttttttatagcagctattacatgaaaaccgtgtactctttccttctgcacctatttgtgcacggtgctggatcggggcttctgaagagtcggcccttaccctgtaggagattcaaggctgactgacctgagagagaaggacttctgcattgctgctcaggatttttgtttttatttttctgttaattatgagcccagaaaaagggaatttcgatttttcagatatgaccaggtcataggaaatgcaattgaagggaaatataattggagggagatgtagcctcctgactttgaggccacacacctcacatacctgaggacaagaaacaaaagaggaaatcagacacatctgacaaaagtgagacggatagagcataaagtatgtctgaaaacagcaacaacaagaacacttcctccaagtgacccctggaggaagacacccccaggcggcccaggcatggagactgtgagactcacatctacagggcacacttcctaggagaaaggcaagggcacattcccccttcatgctatggggctggccgcacctgaggagggagccacaccctttcatccatgccagtctcctccctggaagagaggctaggctggggcaggggtgcggttgtgaggctgaagagcagccaggaggaaacccttctagtgagcagaggatcagctcctccaacacacactggctctggggtctcttgcaggggttgtcagtgagaggtgagcgcccttggctgtgagctgggagttatcagcatggctggagatgagatacacattgctccatcaccctcacctgggaccaggttttgcctatctcaatggcagcgtgactggtgggatgtgacacctctggggaagaggaccaatgctgtgttcagccatgggtgcagggtgggaaaacctgatgggggaaaagacaaagcaaggagggacatttcagtctagctcagtcatgaggatggccaccaaggtttttgccggtcagacatgtctctgatttgatggaggaggagccactttctagggaaaactgatgtctcatttttgagagtctcctttgctgggtggggggcccttccaacagtttttgatacacaaagatctgcagcctcctgagcaggtgattctgaaagatgcagtgtctctctcccagctttcccactgacctttactgaatttcagacttaggctatcccaaaaggcagtcggaaatttgctcagtggcatttacctaactgaggccactggcagcatgacacagttgggtgactttagggtttagagagaaaatgctggcaggggactggggaagggagaagggtgaggtaggagggatgagcttctctttctcgtattgctatgcgttgctgaaaggcaagctaatagttacccagccagggtcaagcagctggagagggaagttagagaaattcacagccagggccctgagagcagcctgggagcacagctctgtcctgcagcagcagaaccttccatggctggtcctcagagccctgtgaaccagcccacccctacgaggattttcttgctctggaaattcctgaaattgattcctaacaaagttggggggaaaggggctgggcaaatgatttttttgtatagcaggcactgtgttcactgtggggaaagagagaaactgcccctgccttcacagatcttaccatgaagtggggagacaggcgaaaacatgcaattacacaaataatggcttccaattgagatctgtacttccaaggagaggtgcgtgctctgagagggtttatggcggcaaagcctagattggggcatctggaagctccatgaggatgaaaaggaggcagctagggaagggcaagatagagaactgcctgtgagcaaaaggtgcccaggccaccagatgtggggcacacagacacctgcagggccagtgtgtcgagagcagaggcagaggcggagcttgcagggctggctggtgtctcttctcttttggccttatttgcctgcttctggcagttttcttttcatacttacatgtcttgcctccagccttgtctggttcttcttctgcataactatgcctgccttgtaataggaacttgataaagaggacttgatgaaatctgagccctgcagcaagtcgggggtggtggaaaggatgtcttggtgccagtgggttggctgaccttggtaaagacagatgccttgctccttggttaaggattttccctgtggagtcagatacatgtcagtttgaattgtaaccctgtgactttggtcgagtaacttaatctctcaaagtctcagtcacactggtggaaaaatacagatagtgcctacctttatttatttgtaacatatgacgatgatttttttttatgccagacaccgttctgactgcttcacagatattagctcatttaatccttagagtaaccctgtgaagcaggtaccattattatcctgattttataaatgagaaaactgaggccctgagagattatgacatgactactctgtgttaaagtcagggttcagaatgatggaatctggatcttgaatccgcagtctcaactgcttatatttttcttatattttcactccgtgtgggttctggaattgctgggataccaagtgtctacagtgaccaggagggaaggaagtaagatttttggccacagggagccttatccttcttggcatatcacttaatattttcctgtgtctccagtcccccaggctccgactgcctggaccagcagcccctaatgatggtcaggctgacaagctgctggcaggactggcacaggatgccaagagccccctcctccccaggaggaccccttagacagcagtgtcagtagaatgctggctaagccctggccactcctcactgctcatctaactactccgtctacagttctgatccggaatgtgaggaacaaagccatatgtgagctttatcaagtgctgagtctatttcagaaaagactgtggagaatgcatcaaagctggttgcttattgcaccatgatccctgaagattggatccagttctgtggaagctggcagaataatgggcccagactgaccagtgagctcactgagggatgttactagttggtccattgctcatctgccaggtcagagacaggtgggaggcaagagaactaattaaattggcagtggacattttacctctaaaatgtagggcaaaaaaaattgcaaacaggccttttatatagaagctaattattaaaggaaagtaaaaatattggggtgttaaagaaatatgtgactggtttagaaaatcctcaacagatatttatcccaaggagggagatttacaaagccaaatttgctcttaatccttaatccacaaagctgtgatcccacaatttcaccaggaataactgacatgaatgctaattggaactctccctttttcccttcctcctttttatgttcttggacaccagcattccggcattctctctaagtttgggagtcctggtctatttccccccttagacagtgatgtttgagtaccactacccaccactcttttggcattcatagtgtaaatggcactttatcagttgaaaatgtgaatcctgtcaacagcccccagctctgccatgcttatcagggcaaggaagagggagagtgagattcagagagatgtactccaccctgttcattccagaagagtgatagataataacattttccggcaagaaacagcaggaaatctaacagacaggaattaaggcaccaaatgggaaagtcaattgcttattcgctccaagttttgtatttgaagggaatgttatttgatttggggattccctcattctccctttcttttttctagggggcaagtggaatagtagaatcaattatctcttcacaaacgtattttccaggctcactgtgtgtgtgtgtgtgtgtgtgtgtgtgtgtaaatgctcatttaaccttttagtaatgtttcacaaacatatatttctcaattatgtcaaagctccccataagtaaaagaaggaatccctggatttttttttctcatggtgtctcttgtcactctaaaatggacctaaactaagaggtagaataacaataatgaaacaacaacaacaaaatactgcttttgtagtgctacccatcttgtttgtacagtgtttgatagctttccactgcattttccttgcatttcatcaacctcactagttgctgtggtataccgatcacaacaaaaatgatgagcatctcagccctgggcatgcatgattcagcataatgcttgcaatggccttatcagggggtagctgtcattgtcctcctttaccaatgaagacacaggcttagagagattgagtaatgtgtccaaggtcacccacctgacaagtgatggagatgagatttgatccgaggcttacccgatgccagggcctgaccaggtaaaatggtcattctttcggtgacagaattgaggcagaggacttgtgaggtcacccatagatgaagaacggatccaggcacagaactctggtcttgttaattctcacagctgctcttcttacctcaccaaggctaggagaaaagagcatctagtcaccaaacaaactcatgctacagagactctctagtctctttcataatgcaaaggaaaagaattctgaaattctataccaagctgttaggtgttttccttggattggggaatgtagagggattaatgaggacaggaggcagaccttatcagggtgaaataacatgaaaaaatgaggatgaactactctttcttcatctactacccaacctctcaaataaatttcttgcaaaattaagtgaattcttgcttcaaatactcaaatagaggatttatcttgtttgttccatcttgtgtgatgaatccaggtgttttctaaagcagaaggcacttaatgtaggttctttatttttttgtgctgattaccctaattggtgggtttccttccaggatcagcagccaattctccactagagtagtatcactggaccttagggtctatttacagtagcagatgtagtggtcacccaataaaaaagtcgctgggtgcggtggctgacaactgtaatcccggcactttgggaggccagggtgggcggatctcttgagcccaggagttcaagaccagcctgatcaacgtggtgaaatctcatctatactaaaaatacaaaatttgccagatgtggtgacacacgtctatagtcccagctactccagaggctgaggcaggagaatcacttgagcctgagaggtagaggttgcagtgagtcaagattatgccacggtactccagcctgggcaaaagagtgagactgtctcaaagaaaaacaaacaaaataaatcaaaatattgtttccacagtgcagttttagcctgctgtctcaaaagggcctgagatttgctatatagccaagctgtgtggactccacaggagactcaggattagcaccttagagtcttgactgggttttcttctttaaacgaagctgtagatttagctataatgccatttgtctgcgcttactactggatgggcacagtggattctgattcgtagtcctattcagtgaaaatagccaaatcattgtgaatacactttaatgtgaaatccttcttctgaagagcccagagcaaattcccatgttagggagaggcagatggatggaggcagagttagctctcaatgagttaaaggaatgtcagcatcttcttgactatactggtagctggtagaatagagtgtattccatattgtaaatatagaatacagtcaatctagacccaaagaaagagaaaggaggggcagcaggggatatactaacttatgaacttgagatttataagcattatcaatcttgaattgaaaaagtgaatctcttgagggagtactggtggcattccaaaagctaacccaagtatccatctagtttatagcaaatctaggcacataattcccttagatgatggaattgagatggaggacatggaaaatgatcagacacccttcctgcctggagtgtagctcagaatgaattatctgtggttaagggaggggtcaagggaggaaacggtggtactggtgaggcattccaagggcttggtgtgaggttgcagtaggaagtggattccagcttttgaaaaccactgttacatctacattgccagcagaaagctgaatgcctacatggcattggaatggagtgaggcagattgcaaaggatggggctggccttgaggttggatcatatgtggctgtttctttgactgtcaatcttcattcttaaatcttctcacttgaacaccttttattggcactaaatttgttttaggataatgaacgcagctgttccaattatggtgctcaccccactcacctccatgtttcacctctcaaagacactgcctctcccttgggactagccctgagcatggtgaggccggcatgcccagggctgaggctggcacttggagagccctagcgtcagaggggttaacacattatctgggcatactcaaatagtatgagcccatcaaataaacaaacacaccaacttgcaaatgaatagaaacatgtttattagagtagaggaaaaacagctttttggcacattaaccctgtggcatcaggagtggcagctgcagcctgggacgacaggcagggaggaggagacagtaaacgtgcattttgaaagtgcttaacatcaggagagggtatttccaagcaaagaggtgtgtgtgcgtgtgcatgtgtgtgtgagagagagagagagcgagagtgagagagagagacagagagagagagagagaaccatcaaagcagtacaaaggccaggaggcagtggtagtgtgcacataagacctaggaggatgtgggtttgaatcccgtctctttcaggaattgggtggccttgggccctgtgcctctctgagcttctgtctccacacagttctcttataatctgtccttggcaggcttgtaagtgaagatcatatgagatgacctgttttaagcatctagcacagaactcggcactcagaagctgctggataaatgccactcctcactgtagttctacgttagaatattccaagttttccatggttcctgaggaggaaggcagctgtgtgttcaggtagaaaagtatgaggtgtgggacagtgggaaattctcatgagcaggtttcaattgaggaataattcatttttgcagtaggcagattaattggaaatgataaactcctcccattgtaaaattaagaattaaaagtgtttatttttattcagtaaataccaaaccatgactgtagtatacttgtattccaaactttgatgatttaaaaagggaagagagaaggagggtgaagggaggagagagagagaatggctatgagaaagagagcaagactacattctgagttcctacacgtcatcccctatccccaaaatagcagctccacttgtatacattgataaattttcaatgtagcagttcattggcagagagatgtccaatacctaaaaatagcttgatagctcctagcatagatcatctgccatatcacctgatatttcatcttccccactaaaatgtaagctccctgaaggcagagattaataatgcatataggaggtaatctttgatatttaggatgaggcaatgaatacatgaatgaatacgtcaatgaatgaattaatcaatgaatggagagacaaggagaatcagactctcttggactcagggaatcttatatctttgaacactaaaattatgcttctgtcttttcttgctcttctcaacccaccttgcctgacagtttgttacattgtcaaactctgtcatttcttcatttagcctgcccctatttcactgttagccaaattcttacacccacagagatgatcctcaacctttgtatgttcaactcttgcacagtccacaaatcccccagtgcactccacggaaaccactttgcaaatgccaagcctagccttgtgtgtcgccttgatgaatgagtcaccaccagctgtgctgcccaccagacagcttcttggttccaggggcgccgcctgctttgtcgtatagcagtgttagtacgattgtttgaatacttcactgcattcttcccccacagaaaaatgaaagtgctgataccagtgataaaaaacataggtttcataaacttaacacaattgaggcaaagatggaaatcatttggcgtgcaaaaaagagcaaatgtttagcctcaatcgggtgcttatcatacttgagctatctgattgtgtgctcagctgtaaaggaaaagaaaaaagaaaagaaagagaacagacacaatgcagtaaatattgtcagagattaagtctaaaatatacggtgtattttggattttttttttttaggtttctagaaatgcagatataaatctagttcgttttcactctcaggcatgttttagcaatgtgatgtggtagtgcaaaaacttcttccctgattttcttgtcctactttgtcaaacagattcagctgtgtgtttatattttcaagaattgtagtaatgtcctttcagttgcctagtttttaagaaaacatctttgaaaataaatacttgcaatttttcctactcctcccaacatgagtgtccaccacgagtcccctttcgccaaacacttcatgttcctctgagctgtgctgccccttcctttcctctgtacttctgcatccttagtgttttctcttgaatcctgtcttctccttcatggtctctggaggggacactgcagatgcttaatttgtgaggggaatcacacaaacatagtagaccctaaagaaacatcttagttggattttgaagtgggcctagactccgcgtgtttttttctcaacatctttctttcccttactcaaaatatcctgcagctggggacttctctcactggcgctgttggttgttttttggtttgtttgtgcctcatcagcttcctctacctcattttgtgatcattttgacctaagaccattgcccagtggcttctcatttccaagatctctacttgggtcctttttcacaagtctgtgcttgtctcataactcctagccttgttcatgactgaaatatttttttatctctctgtggacatgaaacctacatatacagtcctattctcctttccctgttagctctgatccctctgatttgagttgttctgtctgttgagcctcttttattttgtttctttatttgatgttcatggtggcgttctttgtgaaatgtttggtgattctggattgaacccatctctgtaacgctgaatgaccatttgtctgcttgttgcctgtccttgcattctgatggaggaagtgggcgggaggtgctgctgctggaatgtgtgctggtttcggtaaaaatggggaaggcgtggaatgtgctatggggcagtgctctggtcctggctgtggtgagtccttgatcctcccaatgtcacctgccttgagaactctgccctgcgaagcggattaagtctccttcctagccttaagccatgcactccatgtctttctgtttggtgtagagatttagcctttctgacttctcccactgcaatgagatgactaatgctgtgttgcttccaaccatctcgagactttcatccccctcttgacatgggcacttgccatggttggttctctctgcttgctatctttcagggattattcaagttcctattcttagtatgtttctcttcccttattttgtgtgggtttggctggggcagggagttcagaaaggaagagaagattttatttagcaagccacctaaaacaggaagttgccttcttcgctgagtctgagacatactgacttccagaacatcacgaaaccaataggatcacagcccagggcctgaatcctcttgtttgaaccttgttgtagatgcacaacctgtgcatttcaaacgtaggaagcagggtgcacagtgggtacttgctctatattgaatgaaattaagccaatgtttcccacaatgtgtgtgatagatattgtgaaaatgtgaagtagaggaggagtgagagggaattcagtgtgctggtggtatcaagcgtgcaaactctgtttaagaactcctttcacaaaagttttaagattatcctttctagcttaaaaaaccaatatagacagaaaagaaaccccactctggtgctttctcccttcttccattcctgccttgaccatcccttcttcctcatagcctagaagcagcctctgggcctccaccttcccttttggttgtcccctcaccctagtctaacacttgcctctttgtagagaggagcttgtcggacacatgggattcacgggccaggtggttcagcagcccaacaacctggatcctcctcaccctcctctcctcatggccagcccagctcagggccgcctctgagagtctggcctccacaaaggaagatgaaatgtagagacgcatttgctgcctccaagtaacagtgcttcaggtgtttacctttcctcaagtcatagaactagagagcagggcgaggccttagggactgtctgttgaccgattgacacattctttgtattttgaaatgaagaaactgaccctaaacccgtcaagtgactttcccagtaagtgtgtggtaccggctgaactcaagttcagatcctaggttagcagtcctataaattgagaaacagaacctcactactcaagccaagctgatgtctaccccaaaccaaacatccaagtatgcactggggtaggtgctttgtgaccagttcccatggactccacttgagagcccttcgaatcctcccccgccccacaccaccccccatcaccccctgccacgagctctgcatcagcctcagagcctggtttgtttcttcagggtatttatgtcaaggattcccaaatttgttattcagttctttccccactgattcccagctccattcctcagccacacaccaagctacacagtgcctcatggactcccctcctgcaatgggttctctggagtccctcctgcagccttttgagggaggtgcctatttcttccagattagagaccctcctgtcctctagatacctgtagctctccaggatcccccagcttcctctagacaagctcatatctcaagcagtgtgcatccaggaggggattcttccctccacatgagacataggccccaggttgagtggcagaactgcctcttcaggccaaaacccaggcgtgctgcctcaacacgaagaccacactttggcattatacgtcttcccaaagttacaatacatccaccccctgggcttcgttctagattctttcaacacttaagtgtcttattacaagtctctttcctgtttagggaacgggcaatgaaattgtgtaggcaaggggtgctccgtttacctggtgcattcgaggctgaagacaaggagacattatcctccaaaatacttttttttaaagcaagtctgccctagagtaaagtcttcctaaattttgattgttactgcgctatgaacagaggttgtatccacatttaatggaacatagcagtgagagaaactggaatattggaactgctgtcctccgctgatgaaaggaggttgtaaataacattttgctgttggtaaacacgcacaataaatacagaaatatggagccatgcaaaaaactttcgactctgtcacatgttattggtggaaaccactcatagaaaatcaaacacagactttgacttgcagtcacagaaatagtatactacctggagtttctttaggatttgcaatctctgtgcggttgcaggctctgcttgtgttatcttttcatgagggtctagacctgagtttgcagaatgattcagaaatcagtgtatttcctgcttcatatagtgtgattaatcttttttgattttacatgtctacaaatggtgttagtggtcataactgcaaatgattgtgatttttattggtctagaatgtgaatgtttgtgttagagcatctgcaaaagcaaacacttttgctatgttgaaaaaataatgaagatctaagtgattttaagatggcattttgtgaatgcatgctaaaatgctgctagatttttatttgttttactgttaatgctgcattgaagatatagtagtgctgcagcacaatttttttctatttcttcttttcctttgtccttcaaaaaatacccattctagttgcaatttttgttcaaaaatcaagatagtcacacactaagataagttcactatctaagaagtaaagaaatgtaaaagtaaagcatctcatagcagttatcagctgttttgtgtcatacataaataacattttgcttagcattggcatattttttgtgtacgttctaatagaatggccaataaatcaaagtcatctaaatgtctttatcaacaccttaggtattacactcactgatgtttagcatctttcatattgcaattataaaggtccctcaaaccctggctgataaattattttaggtttcttgtgaagaagggttgtgtttaactattaattttcataccagcttatacctaatagagtgtgtggctaatgaatgtgttaaattaaattgagttagattgaatcaaattgaattgaacagaaataaattgaattgtattgaatgataaaccggagagggataatgcatggtgatctaatagcatctgataataacagaacactgaatttacacgcctaacttaggagatatttgataactcatgagtgggaaaattgcccttctcctatgttcctgggcatccttgccaagtggagatgaatgtcacaggagacctcaggcagttatacagttcaagcatcttctgtatttgtgtggcaggaaattgtgccagaagggtcacaaacctgctttattattctgtatgtcaccaagcaggagctccattttttaaagatttttttaaaaattttcttttgttcagcagcagctggctgtgtgtgggcacttaggaacaagtgatgtgagtgcgtgtgtgtgtgtggatcagatagggggtatcatttgctagttttaattggtagattcaacatcttccactaaccatgcagaagccactggctgaggagttaccatggtaaatcaaactccgctgtgtgattggtagacttctgaagcaggtacagtcactctaatcaactccaggaaagttgaggccatctggttttgcctcacttggaagtaatttaccaccccaggtgcaaaaaatttaccctgaggtcagtaacagtaaacctgcctcaaagatgttccagctgagtatggaagaggagtggtgtgacatagtaatttctgtttgtttttatattttcaagcttgggaaagtgagggggctaatcatgcaagccagagccaagaatagatttggcaggtgctgacccagctagtttcagacagcaaagtgaaaactcctgaagctcattctacagcacttctttaatggtccagttcagaatgtctaactaattgagattttataaaaggaactttgactaagcatcaagttgctgaagaatatgatggaagagataggcttttttttttttatttgagtagtaaggagtgaaattgggaatatttgcaaggaagggaatctttcaacaagacttcactctaaaaaaaataaaagtatgttgggccacaaacattatgcatagctatttaggattgtagatattcttgtaatcagacaggatgtagccagccctaaccaaaatatacacagtgagaagacttcagaatcattagctctttggaatagttagaggaatgtgttcggctcatatgacattgatttgttttggctgcacttgaaatgtgtggtctttgcaagtcaatagaaatgaagtcctttattgaatagtagaaactccatggagtaaattatacaaagaaatggaaggccagggttctcagtctcttgtttatttgtgggagtggataccaggcaggatgggtggggctttcgaaaggaaagctcaggggcttgggagaaaggtcagtgttttagactttttgggctcctagagcaaaataccatagactgggtaggttaaaacaacagacatctctttttcacagctctggaagctatgaagttcaagatcaatgtctcatcaggttctgtgtctggtgagggccctcctcttggtttgcagatggctgtcttctcctgtgtcctcatgtggtagaaggggcaaggggactctcctctcccttttgggagcctctgggaagtctctactctccttacctaattacctccgaaatgctcctcctccaaatacccttgcattggagattaaatttcaatgcatgaatttggggacacaaacatttagcctatggcagtaggaatagcaaagtcagattaacggacagccatggagaaggtcattttggaagctggattcttccagaagtgtgataatcccacaaagctggaaatgggaaggccctgaaaaatcagctggtgtgacttctccgtctattaatgagagggtggaaggccagagggcaatatagataaggaataatcaaaatagtggtggattccaattttacagtaccctgttcagagatgcactgagccagcagagcctgaaaagctactggaatcgtgtgtctccccaccctccggtgccctaattgtgcagttatttcagacttagacttcaatcattttacaagtttaatactgatgtggaaggactgaggtggaattgctctttgtccagattctctttgttctttggctcaagagcagtaaggaatggacagacgtgtccttctttcccctgcctggagagggaacacaattaggaatcctggtatgtgagtctgtctccacttcatctcctctacaaaaagaggcagacatagcacttgtgataagccagctcctctcaccatcttcaccctctctaagcttttagtcaactctccagagagtcagaatctgttaaaacacacttaacatgacccacaaagcaacacaaagttaaggagcagggtgctgtgtactttagcacgtgggcaccacaccattccctctaaaagctaactcaacaagggaaagtgaggagggacatcatgttggaaaagcagtgtgaggaagagaggaggaggcagaaaagcacaagaaggggagatgagagagaaagaaaggaggagagaaaggaagaaaggtaagagtgagtcttttgtgggttgcacactctctttaagaatctgataaaaattctttctttctctggaaaacaaaatgcataggatcacatattgcaaataatttggggttcagaagcccatatatagacttgggtaaggagatctaatctatctatctacctatctatctatcctaacaactgcaatttagcaaagttacatatatatatgtgtatttgtgtgtcagtgtgtatataattgtgaaattgccattaagttaggtacatgttacatgcattgaaatatggaatatatgtcaaacccaatctctcattatccaaaaggtacaagagtgaataatgggaaagaattgagcaaagacacattcaaggtgactgtcagcaatgaagagttaatagtgaggcctcctacaatgtagtgacttctttaagggaagggatttgaagccatgggatttcggatgatttaaaatgagcctcactaaagccctggatcacacagtgcaggaaacaaacctgaaaatagccagagtagcaggcagagaagactaactgatctctactctttgaaccccatggttccagtccatttaattgttcttcaggctaacaacttcactttccataggggaggcagtgtaagtgaccatggcctggggttatgggtcagaacatcatacctcattattttaaatgaataaacatttcaaacaaccactgcatttcattggttttccagaacatgattcattttacccgtgtttcctcatttctgtttaaaaatccagcgcaatattatggatttattgtcacactgacaaggatgtgtgtgtatgttaagattcaaagatcacatttgcctctgctctcacaggaagaggttaggggaatggcacattccactggtttgtctgtgcacaggagtgcagggcatgtgactcttggggaaactcctacagctggctgtccggatcaccaggaatcatgaaagcaggctttgtaaacattgcatgcattcccagacattgaacattgtgacatttcatgaccagctctctcagaagagatgccaagtgtagatgtcctttctggaacatccgtgcataattaggctgcccccaactcctcaccacatacatgcaacattttcctgctgttgagtaatcatttgtgcttggctagttttctgtctcctcaaacatcatctcagggcaaaaaggcacagcgtgtagaatatgcttcttatagcagagttaaccagggcttcctcatctcattactagaatctcctgcaccagattccacactgtctctcttctcacttcatatcttgttcatatgattgttcatatctttctaccactagataatgatgtttagaagacagatctaggttacagtatctcgtattttataattattctatgaattaaaactcataaagttagaaacccttgacatgccattcaagaatttaaattctgattggaacctaacttttctagcctggtagtggaaaaatgaaagatgataaatcatgggttctaatcctgacttttcctacttgcttactttctgttactgggtacttggttaagtttaaagaactgtgtaggcatgtgacatacattagttcatcgtaacaattgggtgaagcaggtgctcttatctttattgcttacattaaactcagaaaggtacagaaacttatctgtgagcacgtggacttgcttcatttgaattcacatccgtctgatgccaatagccatgctatacagcctttctttgtgtatgcctgtgcatccttggtaagtctttattttttttccaatgtaaattggggttgtggggagtgtagactagaccagttgtattcaatatttttagttctccatgtctcccatgaagcacaatttgaaaatcactagaatacctctaacatgatgcctactctaacattctaattttatctctttgtcattatcatcccccttccaacccttttcagcaccatgaatttcatgttcctccatttgaacagtgtcttcttctcagaatgtgctggtcatttctgtgcctctacttcttccaaatgctctgctctctgtgaatctttctcagtctcctccacctgaggaactgttccaaggcttttgcattttgcttacgtctttattgttgtcagccatccctgtattagagctagctggatattcatctggacccttctataggttgattcataaatttttatgatggagactgatgactttctcattttagttttctgtaggatctgtgttagtttcccatgcttgctgtaacaaattaccacaaactgggtgacttaaaacaaccagaagtgtattctctcacagttctggagcccagaagtccaaactcaacttcactggccccacatcaagacattggcagagccgcaggagcgtaggggataatctatttctcatctcttctttcttccagtggcttccggtattctttggattgatacattatctcattcttcaaggccaacattttcaaatttctctctgatgcatattcacattgctttctcttctatatatgttcaaatttgcttctttcttgctctgttatgaattaattgcattgcatttaggacccactcagatactccagaataatcttcccatctatggatccttaacttaattgcatctgtaaattacccccaccccaacctcctccaccaaacacacaccatataagctcatgtccacagattccagggattaggatgtgcatggcttttgtgaaacattttttttttcttttgagacagggtcttgctctgtctcccaggcaggagtgcagtggcacagtaacagctcactgcagccttgacctcctaggctcaagagatcctcctacctcggcctcttaagtagctggaaccataggcatgtgccaccacactcagctaatttggctaatttttgtattttatagggtttcaccatgttgctcatgctggtcttaagctcctgagctcaagcagtctgcctgttcccaaagtgctgggatgaccaggcatgagccactgtacccaaccagcttttgtggaatattttttagcctctcacagtgtgcccaacctttggcttccaaagattcttgtctgtcccacatgcaaaatacattttccccataccaacatactgccaaatttcagcctgttacagcatcaactcacatccaaaatcttacctaagtgtcatcagccccaaaagtcccaaactcagcatctagatcaggtatgggtggtactatggatatgatccaccccaaggtaaagtttctgttcacttgttgacctgtgaaactagaagacgggttatctgcttctaaaatttaatggcagaataagcatagaataacagttgtaggcactcctattccaaaggggagaaaatggaaggaagaaaaggttacccagacccaggcaccttccaaatccagtagggcaaattccattacatgcaaggcctgggaataatcccctgaggctaatttcactgccctctgggcccatagctctgccttctggccttgcaattctgggctctggttccaaagctcagccctcacagtcatctttccttttttcatgaagggtagcacatgtttgcaactttgtagttttatgagcttattttctttctatggaattttgggagtctagcaaccttctttcatttagtcatgtccttgatcctttcagtctaagctggacatgtttctactgatgtaatattctcaaaaacctggtgattctcctgtatgtgtcatagggattcatattattagacaaaagggtcctccacagaatttcttagataatctcatctttctttctgacctatgctgatatccattcatatccaagggtcacatacccattcccttcagttctagcaacagggtgttcagtcatatacttggcgttctctccagaggacattttgttaacagtggatcttctaattttagcatattttgcaatttaaacaagctgttaatttctaaatcaagggtctttttttgcgtaacacttctttcctcaattaatctatttttgctcacattttactataagcagaaagaagaaaccaggctgcaccttgagtactttgcttggaagtctcatcagctaaatgtccacattaatggcttaaaagttttgctttacactaactgtaaaacaattcagctaagtttctgcttctgtataacaaaaattgcctttcttctagtttccaacaacatgcttctaatttttttctgagacctcaccagaagggcttctatggattcgctggtaaagacaatctgggctttttctatcatgcacttacaagttctttgagcctctactcattgtccaattccaaagccagctgcacatttttaaagtgtatttcttctagcaataactcacttccttgtagcaaaatctgcatcagtcagggttaaaccagagacacagaactagtaagagacatcaaaaggggtgcattgcagggagttggctcacatgatgatgggtgctggctaggcaagtctgaaatctgtaaagcaggccatcaggaatggcagctggagctttctggcacaggctgaagctgctgtccacaagtgggatttctttccagaaacctcagttctgcctgtagggcctttcagctgattgggtgagacccacccagattatccaggatcatctcttttatttaaaaccaattttatttttgaatgttaatctcatctacaaaaatggcttcacagcaatgacgagattagtatttgattgactaactgggcattgcagcctagccaagttaacatgtcaaactgaccatcacaggttagtaaacacgtcacacagccaagttaacacaacaaactgacgatcacaggttagtttacacgtcacacagccaaaacacgtcaaactgaccatcacaggttagttaacacgtcacacagccaagttaacacgtcaaactgaccatcacaggttagttaacacgtcactcagccaagttaacacgtcacactgaccatcacagattagttaacacgtcactcagccaagttaacacgtcacactgaccatcacaggttagttaacacgtcacacagccaagttaacacgtcacactgaccatcacaggttagttaacacgtcactcagccaagttaacacgtcaaactgactgtcaccggttagttaacacgtcacacagccaagttaacacgtcaaactgaccgtcacaggttagttaacatgtcacacagccaagttaacacgtcacactgaccgtcacaggttagttaacacgtcacccagccaagttaacacgtcaaactgaccgtcacaggttagttaacacgtcacacagacaagttaacacatcacactgaccgtcacaggttagttaacaggtcacccagccaagttaacacgtcacactgaccatcacaggttagttaacacgtcacacagccaggttaacacgtcacactgaccatcacaggttagttaacacgtcacacagccaagttaacacgtcaaactgacgatcacaggttagttaacacgtcacacagccaaaacacatcaaactgaccatcacaggttagctaacacgtcacacagccaagttaacacgtcacactgaccgtcacaggttagtttacacgtcacacagccaaaacacgtcaaactgaccatcacaggttagttaacatgtcacacagccaagttaacacgtcaaactgacgatcacaggttagttaacacgtcacacagccaagtaagttaacacgtcaaactgaccgtcacaggttagttaacacgtcacacagccaagttaacacgtcacacagccaagttaacacgtcaaactgaccgtcacaggttagttaacacgtcacacagccaagttaacacgtcaaactgaccgtcacaggttagttaacacgtcacacagccaagttaacacgtcaaactgaccatcacaggttagttaacacgtcacacagccaaaacacgtcaaactgaccatcacaggttagttaacgtgtcacacagccaagttaacacgtcaaactgacgatcacaggttagtttacacgtcacacagccaaaacacgtcaaactgaccatcacaggttagttaacacgtcacacagccaagtaagttaacacgtcaaactgaccgtcacaggttagttaacacgtcacacagccaagttaacacatcacacagccaagttaacacgtcaaactgaccgtcacaggttagttaacacgtcacacagccaagttaacacgtcaaactgaccgtcacagtttagttaacacgtcacacagccaagttaacacgtcaaactgaccatcacaggttagttaacacatcacacagccaaaacacgtcaaactgaccaccacaggttagttaacacgtcacacagccaagttaacacgtcaaactgaccatcacaggttagttaacacgtcacacagccaagttaacacgtcaaactgaccgtcacaggttagttaacacgtcactcacccaggttaacacgtcacactgaccgtcacaggttagttaacacgtcacacagccaagttaacacgtcacactgaccatcacaggttagttaacacgtcactcagccaagttaacacgtcacactgaccgtcacaggttagttaacacgtcacacagccaagttaacacgtcaaactgaccgtcacaggttagttaacacgtcacacagccaagttaacacgtcacactgaccatcacaggttggttaacacgtcactcagccaagttaacacgtcacactgaccgtcacaggttagttaacacgtcacacagccaggttagcacgtcacactgagaatcacaggttagttaacacgtcacacagtcaagttaacacgtcaaactgaccatcacaggttagttaacacgtcacacagccaagttaacacgtcacactgaccatcacaggttagttaacacgtcactcagccaagttaacacgtcacactgaccatcacaggttagttaacacgtcacacagccaagttaacacgtcacactgaccatcacaggttagttaacacgtcactcagccaagttaacacgtcacactgaccatcacaggttagttaacacgtcacacagccaagttaacacgtcacactgaccaccaccgtgcttgcctgtattaagcccttgatgcctgtgtatctgttaaaatgaaagactgtgatagtagaatgttcccttcctatcagtgaggagatcatttgattcaaatgtgggaaaaattaaagatcatgaaaatacattagccatgattataatgggagtgtggggaagggcatggtaaatatttagaataagctaaacttctaatgaaatgagatctcctcagctggggctggtggacccagatgagcttcagtgggtcatgaacctcccagaattatatggggtgtgcgtttttgtgtgaaagagagaaagaacattttttttttctggaattagagttcatagcttttatcagattcacacaaaaaagtgcgttgtattataaatgtaactacctcatatatatggtaaccaggtcatccatcagtagcaataggcctgtattaggagtccttgacggtggatctaataaaatcttctgtgctcgtaactcacacctacctggatattctagaatcagctcttggagaactcagaggtaatacagatagtggttcttatagggattggctagggcaaaattaggagatgcttgttgtaccaaagtctactggtatgtttcctactaataaatcatgcctgatgcccccaagtcaatgactcgatagaggaagtgagtgatgaggcaggcagcataactctgtgaatgagccaaccccagcccttcccctgacttaaaaaggggttaatgaacacagatggctgcaaaccccccaagcagccagcatactgtaaaacaatattaacatcattgccttttgaataccatgtcttgtaaaccccaggatatgacaagcctctttagaatcttctttgattgtgttactcagactcccgtagggaagtagggaggggtaggggtagataccagaggaaatgtgtaattaggagtctcttagaacaataagggttctcaaacacatatgtgtgcaactgatttgttgcttttggtatttctgttggtgagtaattaactaaccatgttttgggggcagtctgtgcaagcttgggcaatctgatagttgtgaaccatggggaaagaatagttgcctttagctatattttcagaaaaatactaagtggagatgtgaatggaaaggaaagaacagactttctggagagatgccattatggtaatgtcagaacttcctttcagtctcagataaatctttcttgttatcacccttatttttagttttactcaagacaggaggcccagttcagttggagagtgccgtgtacacagatatccctgccacctccccgggagagaggcacaggggcctctgcgggactctggccccttattttacggttgtgattcctcctcactgtggtgcctgtgtgtggggtttcagggagaggggccttttgatttgactgctgagaggaataggggttttctcctgggaactcttctgagagaataagcttttgacaaacactctttgaaagttactctatggccagatgcgtgcagatccaaagatggtgtcatttgtgaaaaatgaggctggcttatgagctgggtccatttgcacacagcctgcagccacggagtccctcagcttggagatgtgctagctccttctgtcctgtgggctgctggggctttgtgtcactggcatcagaaaacagaatttggcagttctctaggctaagggtttccaaactaagtgtcctctgtattaacaacgaggagccaaaatggggacttttctatttgtgaaggggatccagtgaaaataaactgttttattttggtgactttgagtataggaattgtcttctctggacctcagtttatccaactagaaaaatgggagcagaggtgcctagttatctttaggaatgttctgtgacttaatgaagcaatatttatgtaatgatttggtggtgtaaatgtccccagcagtgcatgatgttagttgtatgtttgcaaagtacctagctcccctggtaaaggtaacctttgtaaatggcaagctatgagtattgttaaaaggacatatggctccaccttctttccaaaaaagatcactgaggaatatagggccagttaaatagcatagaaagaggttcagagtgtcttgacctggagcagtttttaaaacctcaggccaaaactccactaggaaactcaccaaactaaccattatggtcaatttcattttgaaataaagcaccctaattcatctgtccaggagtccaggttcctgtgtggcccaaggttgcattcggaggtcagagtaaatcctgtcgctaaagagccactccttctagaaatagctttttttaatgtctgcaatttctcaattcagttctttgactctttagttctatcccatttctggccacaaacctgtttggggtttgctccaccataagtcaacacatgcacatgctttcccatcagttcccagaatgcagaggacactgtaggtctgctaaggggcttctttcagaacttctggggttaacgtggttggaatgtgtgctaacaggctgctctcacagtggcagttctaattggctgaggatgagtcttgaaatgtcacagaaagatttatctctcagcacagattctccctcaactaatttttcagtaggccaccagataatgggttgtttggaaaacaatatgcagttctcagatgcctttctgtgttggaatgaacttggtaggctatttgaagcaaaatggctgatggcaaggaaactcttgactgacttacaggccattggacactgggaacaccaggccttgcttgtgagggatttggctgagtcagtttctcagggtccatcaccattcttgtggggactcagcacacaggtgggtggggaaacctgcctcagaagtttggcttataaagaaatatggggattgatatctggatccttttatatcagcagcaaggattaattttagagaagatatttcataaaaaaatggattcttccctactctcagtttctcaggaaaaatatatttgcttgatttgaaggtaccattgacagttagctgcttgttgatttaataacagctttttttttttaggattaagagaaatagaaaaatgggcaccatgttcaacatacatacagattagaagataaatttctatttcagaaacattgcaacactgttcgcaacaaccaagatatggaaacactaaatgtccactgctggataaatggataaagaaaatgtggaatttacatacagtggagaaatttgttaaagaatagaaacttacagctacacagtatggataagttctggtgttgtataccactgtaggatgactataaaaataatacagtatgtagtttcagatagttagaaggaggatattgaatgttcctaatgcaaagaaatgataaatgcttgagatgatagatatatgaattaccctaatctgatcaccataagttgtatgtattgaaaaatcactatgttccctataaacatgtacaattattaagtgtcaattttttaagagtatataaagatgcatacagggaatgctgcaatatgtgacatcatggatggaccttgaggacattatgctgaatgaaataaaccagtcagaaaggacaagtactccatgattccactgatgtgagatatctaaaataagcaaattcatagaatcaaagagtggaatgatggtcaccaggggctggaatgagaggggaatgagcatggagtttcagttacgcaagatgtgtaagttctggaagtctcctgtacaacattgtacctctggttaccgtattatacactgaaaatttggttaagagggtagagctcatggtaagtgttcttgctgctataaaataaaattttaatcaatacatattaaaatgtgaaaacatattttgtaaaactaaggtgcaacaatatttttggtgactcaccattaaaagtcctacatacatttgctctagaatcctattccaagatgggattccaagttgattttgcatttctaaggttagcaaacattttgtcttttattggttgttttatacatatgtatacctatgtagcaagaaaatttctgatgatctcaggttcatacacagctcttgtcatttccaaacagctctggatttttcgagctattattagcctggagagtatagataattgcagtctacacagaaatctaaaaataaactgtttattcatttttctaaagaattcttttagcacatagcctcttcccagaaaggtttacaagtgcttagattaaaggataattcttttctctccctaccattccactctaaatttctgaagaaaatgtgaaacagcctaaaggcagaaaaggaagtacagtaaaggtcttaatctgtctctcagaattattgaaaattggctgaaaatctaattcttcttatgcaataggtaacctttttattggtggcatttacctgaactaaggtaaatgtcgacagcattggtgggtatgtaatcaatagcatactttcatcatttattttttttaaacaacagatacaatagtattgattactccatacatttcatgctaaatagctgtattaatctgacttaatgagtatgtgttgttgaaatagctgtcttccaactgtaacctgtttttagcaagaatcctgcttgccaaatacttctttttttaatctatagcttctacttgattcttgtgaaccaggggtcagcaaactttttctgtcaagggacaattagtaaatattgtagactctgtggactacactattactgctgcaacaactcaactcagccatgcaatagaataagcatggcatcccaataaaaattcacttaccagatctgcaggtggttgggacttggaccatgggctgcattagctgatccccattgtgttccaaggttggagaaagaaagcaaaatcaacatcatgatttgttgaggccaactatggagaaggcatggtttaacagtgtagtggacaagctgggcaagtttcctgcttttctggagctaacattctcttggagagtggggaaatttgaaaatcaaatctaataagtcagcaaaataatttcagttgacaataagttctatgggaagaaaagatgatttggtaaagaacgacttaagacttaagaggacataatttgtagggggtaatatgggagtttgaacatgcatccatgtttttgagtcccacaccaacatttttctaaggaatctctcaacctcattttttctatttataaaataattaatatcaatacttattgcatagggctacattgaagatcagataagctttatgaagggtcttctgtaaaacagcaaagccaattacaaatttattatatcttatcaatattggtcttgtcatcatttttattacccatctctttattgtgtctcatgttttctttgaagtctttttttccaaaacataacagaatctttaaacgggattgtgtgaactgcaattctttcccttcatattccctagaagaggatttctctaagtcactgacaagttgaaactgctttcttcacattaagctgacttgagaaatcagtgtttaatattcacactttaccttaccctactagaatatcagtcattgccgccagccaaccctatggacttgttggtgacacatgcgaaggcacagggtgagctggtccacaccttcagatgaagagtgtgaaaagacttacaatttggtcttgcatattggaagccttagaaagacatctgttgataacagtgatgagtgacaaacttagataattaaaccttcttgtcttcaagtctttacttgatttaaaatgatgactgaaatgtctactactgtgtttccacttactggaggaagatctcaataaaagtttgggccttgtaagaaattcatgcctacagaatggaaagggcaagagggaaaataccagcagctgtcttttgctgagcccttagaagccaggaactgggaagtgtgttggattcaacttttcttcaacccccactatctaacccccatcacaaccttcaaaggagtaaaattctccttttccacaagaggaagtggagactcagagagactaagtgtcttctcaaagctgtctgactgataaggggcagaggcaaaattcaagcccagacctgcctgatccatagccaatggtgtgtttaccagacagtggtctcaaaatgtttttgattgcttatagccaacaatagaagaacaaagcatgaaaaatcaaacaagcaacaagaacaaactttattttttggtagagaaaggatctccctttgttgcccatgctggtctcaaactccttgcctcaagcaatcctcttgcctcagcctctggaagggctgggattacagttttgaactcccacacctatccaacaaaaaacttttgagtatcactcataatatacgtatatttattggcaagttaaatccttataccattatactaatgtgtattgaacaaataatcaaacacttgaaaaatagaaatgtataaaaggatgcactacaaataaatatacatggaaaaactcatattttcttgccccacacgaggggatcatcacttgcttctcagtgtctactttgaacaccatgacactaaaccaaatggacacatcaggtctaacaatgtttgttctccccagtaaagtcagtttaatctctgtttagccttgcctacataggcttagtttctcaaggattccaaatgaggactgcttggcctggtgaggctagtgcaagctgctggaactgacacactcacggatgtgcggcttcgaacctcagcaaattggtagcacagggttagcatattgcctagagtcgggcttagtttccctcggtgtggctcaggctgctacagcacacttagcactggggtacctgggtgagtgccaccggtgacgctagcagtaggctctggccatttcagaaaatgaactgcttcttccagcacacaaatatcttgctaattagcaattagccgttaagggagaagaaatggaggggaactgggagtctgaaataatctcctaagagacatgaaagaaagcagcacttaaagtaagccagatagaaactgggagctgcttcatttgggcaagatgtctctagacatttttctaaacgttttacattcagcagaggaccccagtgcattctgccaagtgcttttccctttaatttttagatgcattcaaatttcaaggggaatttaatccgtatgtttctggttcttttacacttaactcatcaaaatgttgttctttaagagccgttggatctgtaaggcttatgagcctttgttataagccttttcaaaacctctttcccctttttgaatcagcaaatggaattttgccaattctgaatgggatttcaataaggagaagtccaactttaggattaaatgcagaacctcaagagcatccgacctgattttgcagagatgcacacttgacccttgcatcctaggaggaccgacagcatcatggggtcgacccagtggctggagcaatgcttggtgagcgcgagcccacggaagacaagcaatgtggttcagggcctgtgcttctgttacagaaccagcaaaccttagacttagacattctctagcccatcctcccacccaatgagatttgtgacacataataatgaaaataatgatactaatcagtagccgacactcatggaggccacctatatttccagctgcttttctacactctttgtatgcaacatccatctctcataatccttatcagaatggtgtgaggtagatgtggagttagtaaaacttagtggacacaagtttaagatttagaatcaggcaacctgggtttgaatcctagcatcaacacctataaactctagcgcccgaagaaagttctttaatgcttgccaaagggtgctttcatttccagttgctcctgttaccatcgttgttaaggatgatgttgatgctatccttgttccagtgatggaaaaagtccctatctcctggtgcagccatttttattggtaacttggagttttccatattttctctttatgtgtcaaaatctcctgttttacaaagtatgcccattttttctaaaatagagttaggctaactcctcttttgcatggcagaccttcacattcttgatgacaattgtgaacgtaacctggttgcatgttcctgacactaaaagtgtacacaatgttctggatggggtctgtccagtatgaagtaggaccttgctctcttttgttttgtattttatactattaatatgattgcataatccattaacttttgggaagccacatcacacctttttgttcatctggagttaatatcacctaatataagttttcctttgcttgaactgttcatagggcagtgttccatctcttgtaattctgtagttgattttttaaatttcgaaatatgacattttctcatgggctctaatttaataaaaaacaaatatggatttggtggagaaaaatatacatggtacagggttttgatgttaagtgtgggtatgataaatgtgaagagtttctgcattccagttcctatattaaattcatagcccccaaattttaaactttcagagcctcatcctgaagagtcattatgaaactcaggtaagttttatcatgaaagaatgctgaaaaaaaaaatcaatgccccctggccctcccattgagtaagcaactgaaagtgagcttacagcctgtgtaggacatcttttaatttgccaagtgactaaatgtgcagtcactgcagcaggcatccaccagctgtgcccacatggcccactcagctgggctgcttttcaaagagcagacagggcttatcttagtaccaaaactccatgccaaaaagatcatcactgggtttgagcatttgcacaaaatccccagcagccacgggtagacagctttgcttgacaaaggcagcttcattctccagactaatgggcaactttggctactactgggcaccatgataaaatggctgggcatagagactgtcagccctactggtgattctagccatttggccatttaccttttacctacatttcatctctgtattcccttgggctctgggaagccctttaagcttcaatgacctgttctgtatgagtgctggacagtccctgcaggttcttacttaacctgagagcttgttaaatgcatctccatggaatatcttctattgttaatagttgctggtttggattttaatctaaaaaaaactgtgaaatgtgcttgtttcatatgatgcttttctgagaggttgcatggagatctaatagttgggtagctgatggcaagtgggaatgaaggtaattgattaagcagcagcacctgtgttcctgatatgtacccagtccagtgctagatacagtaaaaatgtaaaagtttagggcaaggtcccatcctctacccagttttgaggactacataacatagttgaagggagaagtttcatgtaaaggaagtaagataagtatataaaagaataagcacatagatgctaagggatttggcacaggctgtaaatgctgtagtccctcaaatgaggaagagttcactgtcactgagaatatcctggaaggtaagacttcatctgggccttggagctgcataggaattagactggtgcaggaaatggtgagacttggaaatgagaatggataattagaaatttgtcatgtggaaatcaaacacacatgcatacctatgtatacatattacactacagaaacaataacccaatactacttcattttcctttaattccctaataactaaacagtacctgattgtgggttccagtagtgatgtacattgacatcttgtagtaagaccttttttcctatcctaagaggatggacaatacatcttcaaaagccagagtggttggccaggcacggtggctcgcgcctgtaatcccagcactttgggaggctgaggtgggtggatcacaaggtcaggagatcgagaccatcctggctaacacggtgaaaccccgtctctactaaaaatacaaaaaattagccggacgtggtggcgggcacctgtagtcccagctacttgggaggccgaggcaggagaatggcgtgaacccgggaggtggagcttgcagtgagccgagattgcactccagcctgggcgatagagcgagactccatctaaaaaaaaaaaaaaaagatagaagccagactggctctttaaatctactaacacttgtatgaagtaatagctttcaaagtagtatgtgaaccagctacttggagggttgtggcaggaggatcacttgagcctaggagttcaaatctagcctgggcaatatagcaagactaaatatatatatacatatattcacgccacacacacacacatattcatatatatatatttatatatatatatatagtgattaaaataatgcaattgctggcacagagaatatgaaaagcaactatattatgagaggacttcaaaaattcatggaaaaatggaattaaaagataaaaaaaaaaacccttcatttctcaaaaaaagcttcatcaaggttaaaacacttttgtaggtggtgatcctagccatttagtccatccctaaagaattgatggtcctgggaatgatgcagaattttcccccctttgttcagctaaatccagttcttgtttcatgaccaggaaaaattaggcacacggacacattgaaaggtgaggagggtggaatttattaagtgaaaggaaagctctcaacaaaaagagagatcctgcattcaggtttccccctcacaaattgaataccaagccaccattcatgagttgaagaggcaaggctcctcccagcataaggcatgaattcctggtggctccactccattcccccggtatgcatgcaggtccttagtcttctaaaaaatcaatgcgtactccatattgatttattttccttactgggcatgtgttaagggacagaattttccatcatgggcatgattaggcaagccccctctgcacaatgacttgggcaggtcagaggttctctggagactcctccctatttgcctaggcatttggctgtctcctccctctatgattcccccatgtaaagaagtacatataactgctgttagaataaggacaaggatgaagactgatcttaactgatcctgctgacagggggcactgtttggggaaaatggcagtcagaggcctaagggtccctggtaaaatggggccattgttcaaggctctggttgcatgaccgtttggagtttgatagcctgaagccaagaaaggacaaaccgggttattagaagacatgtaccaaaatgaaacaaaagcgagggtaaggacggctcaaaaattctgaggctgctggcaggctcagataaccggtggctatagttatttctgctaagatttgggtgcatggcccttggtttgtggttagctcccttggtcttgattttcccaaaaaagaaacctccaggttatgggcactctattactcccatcacctggcaggatttgcaggataattgcccagaactggaatattgattcagatttttatattacccatccctttttgtttcttctgagttgcagccagacatcactgtttacttcagaggaatgagcaggattagtttaaaatgtagatgaaaaacttaatgaatgagtctagaatttaatgacaaatctatgattagctttgaaacagaatttctctctccagtccttatttttgttaaaaacaaatagtgataggactgagttgtttgcaaaataaactttagttttatacttggcctgattatttgcataaagtgcagcaagaataattatttttacataggcttttaaaattggctttgagggaagtttgttccacaaggaatctcagataggactttttaaagctgagcctagccatgggtttctatcctcaaatatacctatgagttgggtgaattcctctcttcttgaagtcacaagaatatggagttcctgggcctgtgagaaagtgacattctttactcaccacaggtgaggaaccctgtaaggggactgtgtagacaaggtatgaggccaatatccccagggggcttttattggctctgcaagttgagcttgattccttaaatggaagcatacccttacagtcaaacccttagcaaaagaaccagtgtctccaattgcatcctcttgcaaaagaaaatggattcttattgcactgatgcaaataaccatattgccataagataagaatactcacagatagttttcaaactctagaggatccaggcagagagaaacaaatgtgctccaaattttttcacaggagtctaccttactcaattattaaagactttaaatagttcaaaataaaagtgcccttgactcagaaaaaaaaaattagcaatattttaagcaaaagttaaaaaaaaagattacttcagttttctattacttcagtctattcagataactcttgttctgcttgatattcgtgaaattttcagctcttcataagtcctgtatgtttttcctttattccgatgtcacaattttcaaaattatcagaaaactgcatttgacagcacctgtcaaattcatgtagctgattataaaccatcttttgaaggggataaaaacaagacaacaattgtctatgaataagaatatgtacagggtcgctacaatcaaaaacatgattgacaaagaaatttggttatctttgtggtttataatacttaacacccttaattatgattgatagcatatactcagacattaggattttagaaatctcatacaattttgtgacatatactaatattatttactaaaatataacctgaagaagattaaacacattttgttaattctatgtacctaaacatgtcagataatcctgttcatctctcatctggatgcctcagggaccctccatggcatccaaaagagagagttcaagaaagacaaccttgaagctgaaatttgattttgggaagcctgttaaatatggtagaggtttaaaacacttgatgttgtgaactagaatttcagattaccataagttatttattttgccaaagtgataacttgaaaattattttagaaagacaaaaacctttactcattaagaggaaatacttagctttccaaaaaatgtctcctgtctttctttcttttccttggtagtctatgcatgaggcaaacaaaaatatttcattatcttttactattacatgaaaatcttgtaccagggagagaaagccaaattttacccttgcattagtttactattgatgtcaaccccaatttattaaatgaaaccttatagaaaattctatgcaatcttaaccagcttgaccatgagctgagattcttgtaaatcttttataaccctttacaaattttgctaatgagtggattagtgccttaagaaaacctttgtgcttttatttcaatgctcaatttacagagtttagtcaatgttcacacacagaattttgtttgcaagattaatttttagaaaccttctataacttgtttaaacctttgtctttatcttatctaatttaaagcaatattttatcccaaggcaaaaatgtacattttcatgccttcttataatcttttactaaagacacattttactgttcttatacaccttgcatgtaaatgtattttcagtggtctcaattacatgttataatggtacttcttagcaatttttaactttaacataaaatctggtagattgttttaattatgcagtaggtgccaataaagttttactccttcttgcatggtgaagggtgtggttaattccatatatccccaggccttaacaattgtgaagcaggcaagtggagcagttctcaacagctaaagaagcagtttataaccttaaaacatttagcaaacctagtatctgacccgtataatttagaccacctatttacattttaacaacatttgcattttaccagtaatctttaagactgtttttatttctcaaagattaaagtcacatgaactaaaaggcgttaaagcttttatttttccttcaaaagtatttcagttaagcacttatttttctttagaccaattaattagagctcttttttatagatatcatgcacatcacatatataactacacagacagaagaagattcagttgttacaagatatttcatttgcaaatctcctaattggattattggtctctgggtggtgccctttaagagcagggttaggaaagcatgctgtttgtaggccctgataaacagacacagctggaagacaaaacatattttgagagggatttatctgcctctattttctgggggttccaagaggaaagcagaggtctctttcaaaatggaatccacggtgccttttctgtttttcccaaggagtctcagagcatcagaagttatcttagggcctttcatacatgcattaagagtggcaagacaaggcagggcacggtggctcacgcctgtaatcccagcactttgggaggccgaggtgggtggatcacgaggtcaggagatcaagaccatcctggctaatatggtgaaaacccgtctctactaaaaatacaaaaaattagctgggcatggtggtgggcgcctgtagtcccagccacttgggaggctgaggcaggaaaatgacatgaacccaggaggcggagcttgcagtgagccgagatcatgccactgcactccagcttggatgacagagcaagactccatgtcaaaaaaaaaaaaaaaaaatagtggcaagacaaggtggagaaaggtaattcagtcgattgaggaaaaaaaaacttttctccagcaaaacaagatccaagaagagaaaaacataaaggccttttaaatatacctataacttggatacccccttttaattaagctgagtgctgtttaagaaagtccttttaagtcccttattacccgatgttagccacaccatgtgtccaatgtttctggcttttgaactttaccaaacgtgacctcacaggtgaaaccaacaagcctcaattaagacgctaaaagcacaccagattagctacagcttaagcccagtctcgtatattctttttcattaatcaaaactttacagtaaatataaacagtgatccttatcattccttttactggtttgcacagggagagaggggccaaaagtccaacaggtaaaaaatattttacccttttgtcagtgtgtcaggcttctgggttctcttcccctgagctcaattctaagccaaccagtgtcaggttttggaaattaacttttctcagtctggaggatgcatctgaggggagtgtcctatagtacagggacacagttacccatctgtaaagaggggacagaggagtaaaaaagaaggctttcttcttccaaaggagcctcagaggttcaggatgcattcaaaaggaaagcagactgaagatgaatggctgctcacctagaaagaggggagccctgcatccctggttcctttctcttcctagggaatacccaggatatgtgagggagaaaagaaaaaaacgtcctttttccttcttctgtccttatattcccaagtcccagtgaccttgatagggtgccacccatggttgtcagtgtggctttcacccatgctaaggggaggcctagagggtaggattatccacttttgcccacgtactgcctttccctctgctgtcagtagcctttgagtttcctagacctcatttatgccatggatactagcatgacctttatccatgaaacaggaggcttggcttaatcagcaagaattagtcatgctcacctacattgtgccttttaactactgttgtcatctccctctggatccctcatatccagttttctttcctaggggttgaacccaaggcttggaattgagtttgggacaaaggaactgcctcaaggaggtgcctggtctcatcaatcccccagtgacccacaccagactggctgctacctccttatcataagcccagtgctaaggtataactgtggaatagggtccttctcaaacaaggaaggggaaaagggtgtcctgtgaattgtggtcctggtctaataagatgcttttcaagaaagaaaaacctctcacataaaagttaactcccgacagggtggagcaaagggaaaaaaaaaagcttaagtgctgggccaagaagacctgggggaagaaccttttgttcctttgcaaatgggtttctccaacagggagagaaacttttgattgctgtcagatcaagttggattaattgaccaggggaagagaagactctgtggatgtggatgcatagtgggaaatgctggccagccggctgcacagggcccaggtccctgaggcccccttgggtccccggcattggctgtggctcattcccatcctgcatggccattggatgccacatagacatgcagtggacacagccatgcaccccagccaagagggaagtggggcagggagccaccactcacccgtatatcccacatgcacacctgtggccattgggatggtggtggaacacccccaatattgtaaaagaaaagataaatgctgttacagtaccaataaaaggaaggaaaataccatagaaaatacagggttggattgaggccaacattcccgacccctgagagtgagtggggtgggggacgtggggcagcttcccctgctctcagaaaaagtctgaggatgagaaagctcagaaatgaaagggaaagatatttttgggttcacattttacttacccttcctcatgtccccatactggccaccaaaatgatgcaggattttttctccttagttcagctgaatcccggttcttatctcacaaccaggaaaaattaggtacatggacacactgaaaggtgaggagggcagaatttttattaagtgaaaagaaagctgtcaacaaaaaaaggggtcctgcatgcaggtttccccctcacacactgaataccaggccaccacatacgagtggaagaagccacgttcttccccagcataaggcacacattcctggtggctctacccaattcctccagtgcgcatgtgggcccttggtctgagccagtccacattgatttatttcctttacagggcatgtgctaagggatagaatttttcaccatgggcatgtttaggcaagccccctatgcacaatgacttgtgtgggtcagaggttctctgaggacacttccctatttgcctaggcatttggctgtctcctgcctctatcaggaatttaactctgtcaatgcagtcttttttgcattattaactgaagaaaaatgggtcccctttaaagattttttttttttaagatttggaaacaaaaagaagccagaaacagccaaatcaagactgtaagaggaatgcctaatgatttcccattgaaactcttacaaaattgcccttgtttgatgagaggaatgagcaggagtgttgtagcagtagagaaagactttctggtgaagctttcccaggtgcttttctgctaaagttttgactttctcaaaacactctcatagtaagcagatgaaatcattgttttgtcctccagaaattcaacaagcagggtgctctgaggatcccaagaaactgttaccatgagccttgctcttgactggtgcactttggctttcactggagcacctccactttgtcttggtagccattgctttgattgtgccttgtttttggaatcatactggcaaagccttgtttcaattcttcaaaaaaatgcttcaggatcttgctcccacttgttcaaaacttccattgaaagctctgcttttgtctgtagcttatgtgggtgctagaggtttggcacccattgaggggaaagcttgctcaatattaatgttttaagtcagaatttggtaagctgaactaattgagaagactatggcatttgctattgtttctgctgttaatcatcagtctcttcaattaggacacaaaaaagatgaattttttcataacaaattgatgtgaatatcctgccctgggcttcgtcttcaacattgtctcctcttttcttaaattcagttattcatttgtaaactactgatttctttagggcattgttctcataaactttttgtaaagcgtcagtgatttcaccattttccacccaagcttcaacataaatttgatgtttgttcttgcttctattttaccagaatttgtgttgctctgttaaaggcttttttcaaaatgtcttattgttcttagtgcctcaaactagatcctgttcagaagttttataaccagttagtatgagtttattttgatgcaaaaaaattaaaattcaaggttttttttataataagtattttctatgatcattttaaatacttcttgtatttacacttcatggagcccttagtgtatgctaatcactcttccagatgctttgtatatattgtttcatgtcatcctcacaatatccttggagggtaggtattattatccccattcacagacaagaaaatgacttacagaaagattgagtaacttgcctaaggaaagacagttaaaaagtgacggaatgagactataaaccaggtattctgactctagcagaaggtgagcacttaaaccatgggctatatgtaggaaaataatctaaatctgcctggcaattaagcacttgcaagtcaccttcttataccttgtctccttggcccttcacaccttccctatggcagagagcgtgttaggcccacgaaaaagctgggacacagagaaagtttctcttaggttttataatctccctttctgctcagacctcctgtacccagggtatgagtcttccagtgccccaccctctcagtgttaccttcccatgcccagtaacttcatctgccctccgttttagggtgccatctatggttaccctctgaactttgtgatcgtgcccgctgtctctagctcttcagtcactgaatcagaaaatttagtgaaattcagtcactaaatccttcccagcttgagttatttctcttctttgacctcactggaacctaaagctccttgaatgccctacttttcctcaatcccttagctacaccctttcttcactttcttccccttcttccccatccagcctagatgtggcaatgcatggcttcatctatcactgtcagactcttcaacctccttaccccactgtcctcctatcacattctcctggaaaaactccactccagaaaaaattcacatcttaagagtttacacttgctgctgttggggaaaatcatatatttctatacagtggtgctttcacaaattcatgatctctcacctcacccagacctaccaaaaaaagtgacagtcctctgtccctgtttttctattcctcccattctctatagcggctatttccaattttctccattccacacaagcctttactgtgtctttcttactcaagaggattattggcatttttcctttggcaaactctttctaggtttcagctcaaaaattattttctcttctggacatggtgagaaaccctagcttataatcctagcactttcggaggttgaagtaggaagattgcttgagcctaggagctcgaaaccagcctgatcaacatggcaaaaccctgtccctactaaaaatacatacacacatacaaaaaaacaaattagctgggcatagtggcacatgactgtaatcccagctacttgggaggcttaggcaggagaatcatttgaaccagggaggtggaggttgcagtgagccaagatcgtgccaccacactccagactgggtgacagtgggactctgtctcaaaaaaaaataataaattaataaaataataaattatcttttcatagttgactatatttctcaattttaacacataccacatatttattttattgagacaaggtctcactctgtcacccaggctggagtgcagtgtggtgatcatggctcactgcagcctcgacctccctgcctcaagcaatcctcccacctcagcctcccgagtagctggggcaacagacctacaccacacacctgactattttttaaatttgcttgtatacttggtggtctgcttacattacccaggctgatcttgaactcctgggctcaagcagtcctcctgcctcagcctctcaaagttctgggattacagccgtgagccaccatgcccagtcccacgtgtttttattacctgtttaactttaccattatcagtaagtttcctgaggtcagacaacatgtattgtacctccagcaactacacattttagtagatgcccaataaatatttgttgagaaaacagatgaataaataaattaatgaatgaagaaaacataagtataccatcatacgagagctctcataactttttgccaccaaagctgtgagtcccgcttcccttccaccttcaatcctcttaaagaaaagctattccacccaaagctagatcttctagcaatgctatggactttgttcacacctatcttctcagtaacgccatttgataatttttcttgtctttcctatgccttcagtctctcactttctatttcccttcagcaatggaacgtgatcaaatctatttcatatttaaaatcattgatttcttgtccaaattctgttctgtctcttccctgtgatagccacaaagaattcctaggcattatttatacttgttgtcgcttctttttcattctgcatttagtccttcctcagagtgcctggcctctgtcctgccactccactgaaaatgggagatctcaccaagatgaccactggctctgctcttgttctttccaagggggaactttgcacttgacccacctgacctcctcaagtcactcagcacctatctccttgcttctgcaaaccttagttcccggattctctgggcctatctccctgtctttcatggtgttctttgggattctacttcctctgacagtaacagcagtattggtgtcccccaggcgttgcttgttgagtccatcatgctccaaggttccagtgccagctatatgctgatgactccctcatcgatggctccagcttagtctctcccaaccctcagtcattgttttcttgatgtttccatgtaaagatctacagacctctcaaattcagtgggcctaaactgacagtatgatcttttcctcaagctcagtttccatatagtagtggtcccttgccaagaggataaaaccagagaccttggtatcaccccaagtcctccattttgacttcccaaatctgtctgaaaactaaacatttctttccatccccatcactccttggataactcaagctgcctgatctctcattgggattattatggcaacccctaactggccttcccacctcaggctggccctgatccaattcattctccatgctgcagctagaaagagcctttgaaatggaaatatgattctatccttacactttttagaagtttccattggcattctcattatatttgggataaaatctcacctttatagcttggttttgggtgccctaagccttccatcatctgatgtcttacatgtttcatttctaccctcgaatcttcacctattcactctgtacctctccacatactcctgataacccacattcaactctggcaatacagactctttcctgtttctctccatgttctctcttgcatctagacctttgcacatgctgtttcctctgcctggtctgtattagacatgcatgctttctgagcccacaagggcatgaaacactagaaagagcacaagatttggaaccagagactcagcttagcagcttatttttcatctctctgtcattcattgttccatccaacagatattggactgagcagtcttctcttcctcccttcctccaaaacacactttgcctggtatctcctgcccatcttcatgctgcactttagacatcaaccacccagaatagctttctttaacacacacacatacacatttataaatctgtcttttttgatattgcattgtaccctgaaattctctatcagagcaatttctttcagtcagcaaatatgtgttggatgcctttctttgtagaaggcattgtgttgggcactgtttacttgtctatgtcaccaacagggtggcatgcttcctgagggctgtgacagtgactatttcacaatttcatatgccagtaactagtactactcttgggttagggtagattctcaaaaatattgtagattctcaaaatatatgtatttatgttgttaaaagaaaaactttagctgaattaaatttcagagtttaattgagcaaagagccaattaaatccggtagtttcctgagccagagtaggctccaagactccagcgcagctacgtggtgaagacttatgggcagaaaaaggaaagtgatgaacagaaaacggaagtgagatacagaaaccgccggtttggttacagctcagcgtttgccttatgtaaacatggtttaaacagttggccacctttgattggccaaaaacccagtgattggcacaagagtaggctacagtctctttacagttttatctaggttatagttcacaatgcacagagaaatctttaggctgaacttaaaatatataaggaggcagctttaggctaaacttgattatttaacaatgtattgatttgctggctggatggatagaaaggtggaaagataagttggcaagctggatttctggttccatgtcttgtgctcttcctagggcaccttgctcttgtgggctcagaaactatgtgttcctatgacagaccttcagatacccctcagggagcacttgctgtcctccatgggtgcagcacttcctgtctgtggctactcgggtgtctctctctcatttttccctgccagactctcaacccttaaagattttagtccttctctttaggaagaccaaaaatgaatgagagtggcatggatttgaaggatgagatgactgaaaggaagagctgactgatttgtttagattgagtagtgcattgaggacactggtccccaggtgttggtaaatagaagccccttaagcagaggagcagcaggcttttcctcctctttcattatggtgatgattattatttttgtggttcccatggaaacaaccagagagagagaacaaaaatgtcagggaggttagaatgatgagatggcccccatatgcttaagaagactatgtgagtccatgtgtgcatcagtgtgtatgtgtgtgtgtgtgtgcactgcctgcacgttctgctccagcacactgctgggtcaggagaagttgtgatgcttattcatggcatttgttacagtcagtctcagcaaggagacaactctcagcttttagtggttagggagtctctgtagtgacagctccatcattgcagggagaggacaaacagagatggagacattcctcatgtgagccagaggagtgtcaaagaagaagacagctcaaaactggagttgccggcctgctcggcgctcccctctttttgtctgagagggctcactctgggcacctactttgtggctgcagtgggtacattgaaggcagctgtctgcagatctgaggatccttgagctcttcatctgctgctcacacttttacttctccccgcctttctgattctttgcctaatttgggagtgggaagaaaatccagcctagggctcttctcagaatggtcagccagagcattaacatcttgagcaccgagagagttgcaggagcccctccacaggaaccctttcatccactgtctccgccaaggctctgcagggactggcggctacctcttccgcatcatttgtggccaggatgttcaggaagcacaaggctgtaagtggtgtcttaaccacagaaggcatagagagaaacagacttgaaagccctgaactgagagggaattcattctgattgagaggagaacacagaagaccagaactaaagaagacattgggacaaaggcagctgctgtccatttcaggctgagttttctcttcagtagtcggcatgcatgtccaaaaagctcaggactccatcccccagccatccttgtgtctaggcgtggttgtcacccacatggttatgtgtgctacttccagactttccaccagctgtgtatcatcatgcagcgtgatcctagaagacacgtattagaaagggaggaaactccattaacctggggtgcttcaaaactgcccagagcagatttggctctggccgtagccctgcctaatgaccaggaacacccacactgtactctacctgggccaaaaagactcttctcgtgtgtcagctgcggacactttggagttgattagttccagtactgactactgccctaactgctgcagcatcccgctgtgggaggaagcaggatgtcatttctatcccaacccctctgcccccaggccccatgatctgccacagctcctctctgacagagtgcagtcaagcctcagtgacagattctgtctcctaggccactcttcttttccttcaacaccattccattgactttctctccccatactttttagtcttttttccccccttgaatgattttcttctttatctttctgaccagcgacctttgattgcaaggagcaactcagtttcacattactagagtaacagagtgtgttgtaattggccgggcattggtcttgaaatgtcagggaaagatttatttcctagtgcaacctctctgggtgctaattttgctataggctgcaggataatggttcccgctcacaatgggcgagagttcctaatcagaatacagggctgtaattgggttgaagggattttaaatcattaaagttgcatttagaatggggaatagaaatagaaccccaagattgaatgactcacttagtatttaatgagggagccatggagtattacttataatattcgcctaatgatcttacaagcaatgtaactccccccgccctctagggcctattcacaaggcacaattctgcagtctcagacccaccactctggagcaattaattactgacccatcaaggagcaatcaggctccgctcggccagcagaagcgctgatttcttcccccagtgtctcctcactcttcatcttcctgcctgccttggtctagggcctgcggggaggggagtcgacatttacaagccataaatcatcatgcagtttttggaaaacccagctcactatgagaggaacagggtgaccaagggtacctgtggagagtctgagaggagaaggcatcagaaggaggctatgctggccctgggagtgtacagtctacaggtttcagaggatgttctctggtgctgcagacactaagtgtctagcacatagtaggcactaaataaattgcagcttcccatgatatgactatgaccaagggttactaacccagctgaatagatttgtttcaggtggcgtgaagctccagcagttattttggacttaatctctaggtagatctgtaagaccaatgttcctgtaaatggaattcctgagaatttaggttacagagaggctgcttaagacatatgtaccccttccttctgcaggttcagaaacagctcagctctctagagagagcacgcaagtgttgtgtgtgtggtggtcgtgtcattgctaatggtccttcctaaagggaacacacatttgggagtgtgattgacctggtcgagtggcactggaaccacagcaggtcactgatcctgagttagcctcacttggctgttggtgccacgtcggccaggatgctggggacactcagtctgtgttgcactggaggccaggatgctcctgggtgctgatggctcactgttctaaatctcatcagggaatgtcacttgtccgtcctgtgtcaggcctcagaaagacgacttccatctcttctagtatttcaagtaaaacaaagtctatgggtttctttggtgatacctcagttgtaacttctattgtgttgacataacaactgagatatcataatgagtaaataacactgatatgacctcctaggtcaggctggcctgggaaaaagctttctatttgagaatgtcttgaacatagagcctggaaggtagtagagacttcgtgaacactcgtgaacttctgatgaaagggcttctcctcaaatacttggatctgatagcttcatgcaggtcattgtgatgaggaccttttccataaaggagccagagggaaaagggttccggcattggttgagttcctcccacttgggcagatggtaggctgctcatcacactaaagtggactcatccgtgatgcccgttttgcaattgaggcaaactttacccttgggaataaactaaaatattctaccagttctgcttttgcccaattaaggcaaagaaagattcgtggcaagtattttgctgtaacaggtattgttatgaatatccattgatcctgctagaaataaatctgtcatgatgtggaaagttaaaacagctaggatattctttaattatgaggtgttgactgatttaaatttagtaactgttaaaatatcagtagttatatcattagtttaccaaaaattaaaagtgataatgcctgcttcatacaaatcagagccaaacagtgtaactttgtgcatgaaagaacatgctgtgcttgatgtaattagtatattcccccaaaattgtgactcatgataaatctaataatatcttaaatgcaaaaaaggtagtccaatattttaaagaatcccatagagaatcttttgtgtgaagagcctttggcgttgcggccatctccattaattcatctattctgaaacttctggggtctgtgcttttcctataaagaaggccacctctgtgcatgcttcatgggtggcagctgtctcctacccacgtgcttgaatgacgagactaatgctctagaccacgcacctcagttgcctgcagatagtgtccctgtcccgatctaatgccaatgtcttagctttgccttttcagtcttctatttcaactccaggcaagtctggctactagcccataaagtgccttttaagaagtgggagacttgcccccgtaggcaaatatagccccacaagtacaaggcgtggtgaacttgtagcatctctatgtgaattccgtcaggagatgtagccccaacctggggttgatagcttaacaagcaaatagtacctggacttcagcctcacatgcttccttggccaggcacccttgtgcagtgaacaacctgcacaacctgtatacagcagccctgcagcttggactgttttgatcacaaccagagcaatgtccaaataatctgccaaatatttgtgcaaacattatgttcatgtttaatcgggagcgatagttttgtcttctttataaaaggagcaaatccccagaagctggtcaggagcaccagctgtttactgcctgcagaagccgctgcttatctccttgtaaccacctgcctcttagagatcatgtcttaattaactcagtgttatcaaaactgaaattgtagcaacacctgtaacatcaaattgtaaatgagagataaagggggaaaaactctgctgaccaagaaagggagcttggaaactctctcttgagctgtaggtagttggctccaggttgattggtggcagtctgctgagaattagaatcagagactcatacattattccatttggaaagtgtcttggaggtcttctaatccagtggtggtcaaatattttttatctcatgacacacaacttattcttctgatgttcaatatatgctgatattttctattttatcttatttatttcattttaaaaactcacggataaaaatcattccattgatttcatgacccactacagattcacaacacaaaaaaactggaaaacagtgatgtagtctaatttctaaaatctaaaggactgagggacaaagaggtgaagtgacttgccccgggtaggttatcagtgggtattgttcttaaacccaggtctatagactccctcccagtggttctgttccctgaaatctactaaattctgccactgcaggacagctccgagaagaaaagcaagtcttaacttaagaaacaggtcttcttgggaccctgctactttccggataacaagcctgagtacctacataatacaaaatgtaccctttgaggagaaggtcaggtgctttctcacataaaaagcattgtaacaactggtggtttgaacgcctcactgcattcccatgctgaaacagtaggggcgccatgcctcctagtcttggtgagcctccttaaaaccttaacaccctgtgctctaccccatccttttcttcctctttcatttccttcccccactttgcaccattgagatccctttctactcaccaccccctaaacttctcctttgagacactggactaaaatcgtgaacaaaataggcattctcacagaaacagtaattccaaattaaaacaaaaacaaaagcagtaacttattacactatgagagacctttttacatttctctgcctatatttgcatgtttttaacatattgaaagaagttttccaaatgaaagctgtctgattggtaaccacacccatgtgtcccatggcagtcactcgtgggagcaatcttgggatctaaacagagtttgtttagtatctttgtgtggtattgatcagcatcattgataaagtatgcactggatgttgttttcccagatcagggattgatttggaagatggttagccagcaccactatgatctgactgtgggcaggcggatcatcacactggggggacacataggcccaaagaggatccagcagattgaatttgcattatgcaagccccctttgagtttcacccactagcacatgcttctgtgacagttgaattaccagctatagaactggggtggcaggaagcaggccatctccattagcttcttttgaatccatttcttcatttcctttggccctgggcatgtgggcacaaacttactcgaatggccatattcacagaagcacaactttctacagcaaggtattatcagctgttgctgtcttcggaaaggctttattgtctcctagctaagggaatccctcctttccttccagggttcactaccagcgccccacccccacgcatacatatacagacactgagctgtgttttgatatgtgaggtgggctatcagctgtgatttaatgacgagtatcactgtcagactttacaaaatggaatttcatcagatggtgagggaagacttctgcatagaaactacagagggaaatttgacagctttttccattcagttatcaaagcatttgcagttcaaagcaggtgaaacaataatgtaatcttagcactgaatgctcatttgtatctgagtgtttcaataaataaaatggtcagggaaatgaaagcagacctgttgtctccaatccactaaatttaatatccagggtattgactgacagctttttatcaccataattagtatggattgttcctgaggccattgatcaatctttcctacctctatggacttgagtggctgttttcttcctctcctgccctccccaccctttattttaatattgatcgtgccagttgtgttccaccgcagagaggctgctcacttaggcaaaagaaaactcaggatgaagagagatggctgagcagcagccatttctaggtggcatccacctgtgacatcactctacctcatctatgttgaccttgtaacttgacctcttggtaccagtgaccttcagctcctcaatacgataaccaggcacaccgtcttccccactgggtggaagttacacaaagactagctacagaagccgtggtcaggaaatatctgttgaattcatgaataccccttctgtaatgttgtcaagctaaataagggagtttggatagaccaaggaacacaaccttgtgtgtgtgtgtgtgtgtgtgtgtgtgtatgtttgaatgtatgtgaatatctatgatgtaacctgttccatataatgcaggccagaaacctaagaccttcttatttctcaccgagctcttccaatttgatgttgtcctcttctcagtctgtctatcactaggcgtatacggtgtgtaggtatacacctcactatctcttgccttaactgttgccataattcactatctcatttccctgcctcctgtcctgcctcacctaactccaaccttgcatcttcaaatcttccacacagaggacaggcaggtttttgtaaaatataaactattatagtccttgactgtttcacatctaagatccttgtcatggcacaaaaagctttctgtaacctgatctctcctccctacttctcagccccatttcccaccattcctacaggtcacactgctggaaggtagaattgcaatggatccgttcagtcattgcctgcttcacgcctctaagtcttggcttatgttctgtattttgcctgcagtagccttcacattctttttctccttggccactctttctcattcttcaggaattcattcagatggtatccctttcaggaaacattactttagctcccaaagtatccgaactatgactttttctgtcttctgagattttaatagaatatatacatatacttttttatgcatctctatcctatactagagaataaacctgaaggggacaggggctacgtggtttttcgttctgtctccaatgcaaggcacaactcctggctcctaggatgtgtttcttgcactggaaagaagtattcctaagaagagagtcagtgtgcctgaagagctggggcatacattatgtcaaactggatctgtcttgggacacacaacgtgctgtgccatataactgcaccacgaacaaaagcgaggtggatctcacttattctcagggtggtgagaagagatgggaaaatatcccttcttcttataagcaggtagcaaggtatctttctgaccttaaagaattcaggtgttgtcaactggttattttccacagtgtggaagagttttgctatctatacactggagtagttttctcattggtcttcctaatggaatttccctctgccccactttgtagtacagatcacccatttgcataacttttcggaaggatgcttcctgaggggagagatgccatgcatttctgggagtgccccatgagcccacactgaccttagacagcccccttgctcccaatctgcaagctgtgtggagcctgtcttccctgttcctggcacagcagcctgccccaacagttacaggtgctcgcacacatcaaatgcctcttgttgaggcattaaaccaagtgcaacttttccgaactgagcacaacagagccaaattggactggaaaggccacaggttcctcagggcctcagggagcctgtggcatctacattgcaaattggccccatagaaaagcaactgatgccagggccggccttcatttcatccctaccatgcctattgtggaaccgcaggggcagatgtttctggaggtgaccgcctgggcgcacacaggcgcaggcagcacctcctcctcaccggcctctctccaggcttatgtaagacagattggacagactgataccaattggcacatcgtccctgccagattggaatcaggcccttctaccatctttggggtccacggtggctccaaataaaatgtacagaaggaatgtgattcttagctacagccaattttccctttgctattgcgctggcatttctaatctcgggcattttgttgctgtggagcacaccactacaaatacagtctccagcttaggaacgttgagatttgcaatcatgtgaaaatgccttttcgtattcctacagtttgtctggataatttatttattttaatgtattatttagtgcaaaactattaagtgagcttcaggttatattgttacgttgttgctaattcagttacatatggctggggcaggtgacaacaaggagggaagatacctatggcacctgctctttcctttcctgagatttctgcagcttctgcatgtagatacttaaccctaaaagggaaggtagtgtgcatattttgcctcctggattcgtgtctcaactgtaccactgagtggctgtgaatttagtcaagacacttaattcttccgagacttaatttccttacctctaaaggtcttcccaggctggagggttaaatgacgtggtgcagatgaaaatgcagagcaaggagcctgacacacaacagagggtgggcaaatgcctgtcctctcccttgctgtcccttcaagtggccttcatcagcagacctaggcatagcacctctgaacttcaaatagtctattagtagcaggaccacatttgaagttatgcgtatggtatacaccaacttgtatgtgtgttgtttaggaaggtcattctacagagtatatctgatgcagaccgggactgtgtttttcgttgttgttgttctattcccagttgtgcaaggcacaactcctggcacctaggatgtgtttgttgcactagaaagaagtaatcctaagaagagaatctgtgtgccttaagagctggggcatctttatgtcaaagtggatctgttatggtgcatgcaacaggctgtgccgcatgaggctatgtaccaaaatatttacagtagaaatttttgagtgatgagattataggataatttccctccttccttccttcctccccttcctccctccattttcccccgtcccatcttctttccttgcatccttcctgttcatgtatttttttcgtaaagtttatatcttataaagtagtaaaagatacaaaaataccctagctctttaaaaattgatttcagccaggtgcagtgactcacatctctaattccagcactttgggaggccaaggcaggaggattgcttgagcccaggattccgagaccagcctgggaaacatagtgggacccccccccaccaaaaataataataactaatagtaataatcataataataataatgggtgtggtagtgcatgcttttagtcccagctactcaggaggacaaagagggaggattgtatgagaccggcctgggcaacatagtgggaccccatttctacaaaaagaaaagaaaaaaaataaattatctgagcatggtggtacatgcctgtagttccagctacctaggaggctgaggcaggaagatcacttgagcctgagaggtcaaggctgcagtgagctgtgattgtggcactgtaattactgtaattactccagcctgagtaacacagggagatcctctctctctctccatatatacatatgtatatatatatatatatatatatatatatatatatatatatatatatatatatatttcatgggaagccaaatgaggagggcaacatttgagtcaaacaaggaagcccatctctgatgagctttcacaatgtcctccttctttcaccgtgaggagacctcaggttcactgtgtcagctcaccctatctgacccacatccccatcactttcctcccagtgggtggaaggattcacccaaagctccaacacgcacagctgaaggagcacgagttgagacctgaagtctgaacatggcttaagatggaacgccgtttcctgaaaccatgccccgtatctccagatgaataaacttggaacatagaaaattcccaagggtgtggaacactggtaggttcagaataaataaatatgtctgcttattaatatagtagtactgttagctcagaaaactgtagaaaagagagctattaaaattcaatgattgggagagaaacatgagaagagaaatcaaaagaaagggaagaggagcatagtaaagaggcccattaggaagtggagaaagaaagaagaggtgggagaaaggaaccagaggaagaccacggtaagcaggaggaatggagaaaacagtgggaagagacaaaaccccagcaggcagcagagaagcgttgatcctgtttccagggtcagtatgagacttaggcactgcagcagccagaccacgtgactaattgtccttaattgtcatgagttgactctccaggctgggggtcccaggcacttttctcagattggttggctgacactgcaggcttctgtcatcatgcagccttgctgtctgcttcatgctggcagacattggcttgaggtccaccttcactctaaccatcttctccgttttaacctaaagattgtttccatatcgagaaagaggggatgttctagatggcacctgtgcatgtgtgggagggaggcagagatagagaaccttgtaactccctccaccagcctgccaagtccctgctgtaatcccaggcccagctcagcaagggaagcttaaacctaagtcaatttgagggtggcctgggatcatgggctccgtggcaaccagggtggatattggtctgtaataagtcagtgaaatagtgaggttcaattacttacatgttccctgaagctgaaacaattgccattatcccacataatattgcttgacctacatttttacttgaaagccttcagctaacaattagtttgaatgttgagttataaatgaacacattcatattccagaaatgaaaagggaaaggggagtgataccaacacggctccctctcttcccgccctctctttcctttgccttttgtatgatatttcaacttagcttttccaagatggaagtcattggagagtttgtctaaagggggaccattcagaggtaatgagacaactgggctttatctgggaaaggggcagcttggtcggtgccaaggagatttgagccatctggattaaaatggtcaaactctccgcaggaagcaattaagcagctccatgtggagaagccacgtgaccacgccaaaggagctgccaagaacaggagattagtaaacaaagtacccagcaggaggtgtccaggttggtcactgctctggccacttggcatttgcacagcttcctctgtctttggcatcccatctgtctgtacccacagcctacctataagctatctgcagagtttaaacaaactcaggcagaactgagtttatttaaaatgttaaaagtccagggctcgggtgatcgtgatgatacatcttagactcacacagcatcccttcccaggtgttctggcaatgcctcggatgtctttgatgactcttcgctgcctgtgaaaagcccagaggtgtactgccattgagctgcgatgtttaattccctgagcgtgatcatttagccatagatagtcacaactgggttaggaagcatgtacctagattattttagtgattattttagtgccggtctttgtgaaagcttgagaaaaagctgagttctcctttcactctaagaatctttttgtttaaaaaaaaatccataaaaggcatgtaaaactcccagacatatgccttttttcattcagtgtacatttattagccaggcactgtattagcccttgtggttagaatagagacccgttctcatggatgttacccctggccaaaagaaagacgcagaggcattgggactgtcagctactccctacatagagtcctcttctgatttccagtcaagtcagtttcacacaacacaaaactaacttttctcaaggatttgtaacatcttgaagttttcatgtgacctgcaatgggctaatgtagaatggtagttcaagtaaaagatttatcctttttttttttttttttttttttttttttgagacagggtttcagtctgttgcctaggctggagtacagtggtatggtcagaacccactgcagcctcaactccccaagctcaagagatcctccctcctcagcctcctgagtagctagaagtagaggtgcaccactatgcctggctaatctttttttttcctttatttaaaaaaattttttttgtaaagacagtgtttcactttgttacccaggctggtctcaaactcctagggtcaagtgatccccctgccttggtctccaaaagtgctcagattactgacatgagccactgtgcctgacttttactttttttgaatgagttaacggcagcttactgtgcagcaatgtatcatgggaacaatctatgatatgttctcattgttcctaatgttcttgacttccatgacacataactccctagttttctttgtccagcttttctaagctctgcatggtgcactacaccatcttgaatgttgtcatgctaaagacttcatcctatgtcttctgtaccctgtctgcatgtacacacctggaatctctttcataaattgatatctttgctccaacatctccactgagttcctgacttataggtatagtgatctgatagaaagtcccacacaaacatataatgatcattttgttttactcaaaccttgttaatgatgcctactccttctcaataaaggacaccaccttccacgttgttgctcacaccaaaatgccgcatacaaactttatccctcctttatctttcctccccatctcgtaatatccattgtttctaatcgattcacacattttgttgagtgaacttccaaaatatatccccacttcatacctttacctctatttcaacaggctttagtttaatccgctgtcatcaaaacgacaatagctgcatgagcctcctagctgacctctttgttatcttgactttcccttgatactctgttctccaaaagaaaggcaaaaacatatttttaaggaatgaaatagtgccatttgtagcaacctggatggaattggaggccattattttaagtgaagtaactcaggagcggaaaaacagacatcatatgttctcactcataagtgggagctaaactctgaggacgcaaaggcataagaatgatacaatggactctggggacttgggaggaagggtggcggggcgaggaacaaaagactacacattgcatgcagtgtacactgttcgggtgattggtgcaccaaaatctcagaaatcaccactaaagaacgtatccatgaaaccgaatgtcacctgtccccgaaaaacctattgaaataaaaaatttaaaaaaaattcaaatatttttattattattatactttaagttctggggtacatatgcaggatgtgcaggttttttacataggtatacatgtgccattgtggtttgctgcacccatcaactcatcatctacgttagatatttctcctaatgccatccttacccccactcaccagcccctgacaggccccagtgtgtgatgttcccctccttgtgtccatgtgttctcattgttcaactcccacttatgagtgagaacatgcagtgtttggttttctgttcttctgttagtttgctgagaatgatggtttccagcttcatccatatttctccaaaggacatgaactcatccttttttatggctgcatagtgttccatggtgaatatgtgccacattttctttatccagtctatcattgatgggtatttgggttagttccaagtctttgctattgtgaacagtgctgcaataaacatacgtgtgcatgtgtctttatagtagaatgatttatcttttagttatatacccagtaatgggattgctgggtcaaatggtatttctagttctagatccttgaggaattgccacactgtcttccacaatcaatgaactaatttacactcccaccaacagtgtaaaagcattcccatttctctacatcctctccctcaccccttccaccatgtgaggacacagcgagaatgtgccatccataaaccgggcagtggggcccaaccagaccctgaatctgccagcaccttaatcttggatgtcctagcctccaggacaatgataaataaatttctgttgtttataaggaaaaaaattaaatatttttaaaacatgaatcttctattatattgctcccctgcttagaacctttcatacttaaaatccagtctacttatcaaggtgtcaagacctacacgagttagcccctactttcccctcacctccatgtccactgtgtcccactgggcctcttggccagccatgctgctctcctctcggctccgggacgccacattttctcctctctcagcacactgagtgtgcacagcattgtgtactgtacccaatgtgtagtcttttatccctcacctccctcccactctttcttccaaatcccaaagtccattgtatcattcttgtgcctttggcatcctcatagcttagttcccacttatgagtgaggacataagatgtttgggtttccattcctgacttacaatttgcctggttctcccctcttctgtcccccagtcctccacctgacaggctcctgcttaccatttgggtttcaggacaaatgttacctcctcaaaatggacttccttaaagacataacaacctttcacttgggctcaactctagcccaatgccctgtgtgttgtcttcggagaacttactgctctctgcaataaacttgcatcttttttcttcctgtttctcttctgagtagtgcataggctccaggaggggagggcctatgccctgtcttttgtgtgctataccccagtggctagaactttgcttggtgcagatttgatgctcaaaaagtatttgctgaacaaatgaatgaatgattacataagtgaataatgcactcttctttccataattttggttttcctggcaccaaaacacttaggaaataatatggtcttcaaagtttctgcatgtcttatctctgccaaggacagttgcctctccggagaactgaattgtcgacatatggctgaagtgtgatccagtggactggaggtatgcactgagtatattcctaatatcacgttgccctgtggcatggggcttaatgcctttccatttttggctgaagggcttcactgcaaatgctttcaatcatatccatgtttggttgaaattttatggcaaaagataacttagagacaaggatttttatttgaaaattacattaaaatatactgttatttctaaatatatgttcaaaatttcaatgaatcaacacagagtttttattgaacttctctattcacatagcatatgaattctcactttctgtcacaagagaagtaaaacttaggccaagcatggtggctgatgcctgtaattccaacactttgtgaggctgaggtgggaggatcacttgagctcagatgttcgagaccagcctgggcaacatagagagacctcatctctactaaaaataaaatttaaaaaattttaaaaaatatttttataataaaaataaaaggcatggtgatgtgtgcacctgcagtcccagctactttagagtctaaggcaagaggattgaaaccaggaggtcagagctacaatgagccatgattgtgccactgcacacaagcctgggtgacacagcaaggccctatctcaaaaaaaaaaaaaaaaaaaaaaaaaaaaaaaaaaaaaaaaaaaaaaagagacagagagaaagaaaactatggtccaaagtttaatccctgtttaaaacagaacgggctagtctccttggtagcaatgcatgtggcaggaagtccccagaaatttatgtgcatgcctatgtgtgtgtacgtttgtgttgtgtgtgtatttatatatgtgcacatatataaatatatgtattttttatatatacatatatattttttcttgattccttgactttttaatctcctttctctctatgtttaaaagttttagaaaacaaaaacaaaacaagccttccagtcaaaaaattttcagcacaagataagtgaacagaagggatctatcatcctgaactgtttttcataagccttcatacagctttaatgcaacacagaggtttggacacaagggtaagcatcaggcatcgaggagctcaaattccaattcgtgatgctgcagtcctctgcagtcctaagcaagccagtatggctgctcagtgtcacagtatgccctgtgtaagatagggattgttttaggaagatcagtgaaagtttaagaactgacctcctgaaaacagttgtagattcctcagacatcaaagtcagctaaagaaaaataagtgctaggcttcagattcatcgcaccaaatgacttcctatctaaattctacaataggtaaaatagaatacgtttcttctaaccaatcaacaccacttggaagctggatctgtctccataatcctggttagtaataaagatgcttcaccactagtttgaattttctggcgaggttgtcagtgattcgtgcttgaggcagaaggaaaccagtttgattctcgcataggcgtttggcaaaggaagagagaaactttgcttttctcaacagaggctagaaatgactcagactacaaatagctgctctgccatacaacaaaaggtcatccctccctctcatttttcctttcccatttgtcctgaatgaaggccaagctatatttccccatctctctcttctcatctcaaaatgcatagccttctttatgtggtgcattctagttcggattggtgtgtgacccaggctaagacagtgttatgcagattggagcatcttaaacagaccacaattgaatcagtcttgccaccatttgtcctgtccactataaggcattgaatggtaaatgaaagaaactagtgtcttttattcagcctagttctcttcttgcacacatgtttcacagaagggtacagctcaactcttaggggaaaaatttctaaggaagaaagaaaaaaatgaagaaagacattttcagaaaccattcccttagtaaataatgagaagtcttagagaatctcttgtgtttctctgatttgatagagaatgatgtttcagctttggtatgggaatgactggtggagtcaacagcaagaaaacgagactcccagtgggagggtgtgtactgccaagtactatgtaggcaacactgaatgcagccaagaggcggccttccactagagaaggcatcccgctctctaatcatgacgtccccccgggctctcagagggcaaaacttggaccgaatgctgttttggtctaacacacattttctgggactgcacacttacacacacacacacacacacacacacacacacacacacacattacatggcaagtcttctggattagcaggagaggctgctgatcaaatgcacccctgggcttctattcagattagctttgaatgaaaacaacaccaactctgttttcttattttaaagatcacagagataatcttccttggtcacagttggggaaacagccagagggggtcttgttacctccagaaaagccgtggaagatatctgaattcctgctgggcctattggaccatcttttatgtttttagacagaaagaatctaccccagtgagattctgaaagcagctcctcccagtcatcctctcctaggtattgtttatagctgggcccgtccctcaaagtgtttatttttccgtacatgcatacatcatgcacactacctgattgctttgatcaggttaaggatgggagcaggctctacttgcgagtcttgtggcacttccatgcagcccgtgcccagtctcagcgaggcacttctcctgggtggttggtaagatattcaactagagacttgcttcttaaataatgttggaatcatatccacggttgtaatgaacgcctctgtgatttgcatttaaatagtattttcatccagagatcacaaagaggaaagctatcttaacatcctgactctaattctctgtatctgaaagccagtctgtgtgcaccacgtacacattttccctctaggtctctttcagatctgtgtaccctactgatcaaaacaagcgtttgcttgcattaggatggaagaccccgacagctctggcatgcactggattctctcgccgcacccgcttcatcaacctggatccccatgagctctgattgaaatgcctccaccactggctgggatgtgagaggcactcccagatggtgtgctcagtgccaggcagttaacacaatcatttcttgggttgtcaatgaagccaattggatctggaaatgattgagaggcagtaaatatagacccccaaagtcaccttagcagtctctttccagagtacagttgtgcttcgaaggactccatgcaatcctaaggctcactttccaagccctgggaggactagagagacaaagggctggctgggctcagagacaggaaagggcacagaagtcaacatcaggccctagctttcagccccactgatggctgctccatgctgattcctcagtttacccatgctgcggctctttccacctgactccaggctttttgtttcttttcatgtcattcttcatcatcttgtggaaggatgttttttcatattgtacagttgaacttatttcatcatcaacaaatttttctctttcccatggattctttaaaaggcgtcttttgaagatttatttctattcggatgcaagcttttgtttaaaaaaataaaagagatgtaaatatggaatgttattgaaaagatcttatcttgcttttgacatgacatctaaaaatgtgtttaaaataaagagcaagtgttgttcaaggcatgtatcaaggcagttggcttcctgcagtgagagctgggtagtacttcgaacacttttctgcccctatgaaagcctctcacaggttaggcccctgcgacccagtgtcctcctccttaaatgtccctttctgatcagccacgagagggcaatgcagggcacttggttggctgccttggttggattgcagttggcaagttactttcagtgagggaagctactcagactatgacagtaattatatcagtctcataaaaaccctgctctccccaacttgctgctgccctttttcctttgctgcctgccttccttcctttcccatacccctggccattggctttgtatttgcagataactcactcatgatcctataaggcagagaagagtatgtgaaattaatgtttgcattttaaactccgaactagaataataggttgtttctagggggaaggatcttggagatcatcaagtttagcctctttaagatgaggaaacctaaattgggaaaggtggcctgactggttccaggtcacacagtatcacgggtaggctccaggggcatagacattctacaaatgcctacattttctttatccagtcatctgttgttggacagttaggttgcttccatatcttagctattgtgactaatgctgcagtgaacatgggagtgaggacaatcctttgggatagtgatttcattttctttggatatatacccacaagtgggattgctagatcccatggtaacattttcggcaacatggatgaatggggagggcttcaggctaagtgaaataagtcagacgtagaaagacaaacactgcatgatctcacttatatgttgatctagaaaaatccaactcataaaagcagagtagactagtggttgcctagggtgggtggagtgggagagaatggggagatgctggtgaacgggtacaaagtttcagttacgtagggtaattctggagatctaacgaacagcttggtgactgcagttaacagtactggatagtatacttgaagtatattgagagtggatcttaagtatcctcaccacaaaggaaagaaaagaaaaagaaaatggtgaggaggcgaggtgatagacatgttaattagcctggttgcagtgatcatttcacaatgtatatgaatgggaaaacatgagattgcacaacttaaatatatacaagttttatttgtcaattattccccaagaaagctgaagaaaagaaatacaataagattagggccgaaaacaaaggaaaggtagacataggtaacattttcctgtcaggaacacacaaacttccagaggaatttgggaaagaggagatgactctgtgggaggaggctcagccgtagtctggatggtgatgctctgttctacgcacagtagcctcggtattcagccagggacccaggagctattgaataagccatgactcagtgtttctgtgaccacttgcccttgtctttctaatgtttgcttaatttacaaaatgatgatgttgcgttcctctcccttcattgattatcactcaaaccttgtaggagcctttacctgcaaatcattcacacactatgtggcaagggctggtgagccctgctctttcatcagctctcaacctgggaagatcctttctctattggggcaaataagcaaaacaacctaaaaatgcctttacacaggctcatcctcctccttgtaatgctctttgccccattcatccattggttgactgctatagcttcttctaaactcagctcaggtgtggccttctctgcgtctctctgagcatttctcctttctcccagttccctggattaggcaccgtatcagtcagaaaccactctaggtataacagtagttggacttggttgcacatgtgatgcaagggctgagaagcctaccaggagagggtgaggcaaccaagggagtaaacaatggtggacttgactaccctattcccacttccacacactccatagggctggagggacacagggtgagaaactgcttttaagtaggggccaggccaatccagcaagtgctaggaccatggaggtaggggctggagccactgggagacactgcccatagatagtacccaaacagaagtggggggtgatactttctcctactcttccattgaccaagacagtgctgaagccagagggagaggaagcctgggaattatagggaatgcagtttctggatacagagcaaggcagagaatgttgggaaatgaaggggacagatacatgagtgcccgcacctcttctctggactcttactgcatcttgtacttaaccaccctcatagtagtaactatagggtgtccttaacatcattcagagcaggagtgttccttctacctcaaggacctagcatagtgcccagcaccaggagatatggaaggaaggcatgcataggtttgggaaattgtgatatgccatggaaatgcaagtcatgattattaagatccagccaaaagcgtgagctctgctgaggatgacagttatagacctttcttcaccacatctaacagatggctcagcccctttccgtgatgctatcctcatttgcagacttgaaaactagtgtagttaattaaaataatatgagtgaatgaaatataggtgtagggaagaaagaacaattctgcaaggagcccaggtcgaagaaaagtaagggggaaactatccatcgaggacaacacagagcttcttatgctaatattttctcaagaggtgagactatttcctggcatcatttgatcaaggcagactctcatcagcccccaaagtcatagaagtccaaagttccagaatgactcacattcatttctaattctgcattggaaaatttctattagaaatcgtgagtgttcatttaaaatgattgtttttttgtattgcaactgctttctaccagtctagttaaccctctagcaatgcaaatgttgttcattcttgctacacgaagacaaagagagtgtttgccaatgtctccataagggaagggagcattgctttttgtttcttctctagttgattgagtttgaaaaggttagaaaagtgtgtcagtcttcagactggaaactctgagcatgggcccctctccctagtctgtgccccaccttgcttggcttcctggccatgtgatggacaataccaagctaagcttctgctgatggaaggagtgacaagtctttgctctcagaagtgaagggctgtgatttgacaaagggctttgaaatattcttatatataaagcattaatttcattaatgtaatcaatgctaaagaagcagaccaaccgggccctttgattcttcccaggctaaaatctgttgggctgatgtgatataccaaaaataaaatagtacccctctccatacttcctgttgtccacacaggaatttattggtctgcattggatttactctctgatgtatttgtttatttggggttttgtttgtgtaagttccatgagaacaggggcttagcacttaaaaaatactttactgctctgtttctgaatctaagaacaagcacacagtgggcgctgaataaatgagcattgtacagaataaaaagtaccccagacacctgtcctacttcagggcaacactgagctgttagttataggtatctgtccagttccttgtctgtgctcataccctcaagtacctaattcaaaactgaagaagaacttgggctgccttgggaccaatgactccgcgctaacttgaattaaatcaatcttgtcactcccatctgcctgcctccatgtcatagtagattaattgcaacataatataaaacacatttatattgcatcttcacaatagtttcagggtcctttacagtcttacaatctaattaagcggtagcttcaaacatgaatttctttagtattttaaaagcgtaagttgagcagataagcttttttttttaacttccctattctaaaactgaaagaccagctgattccaaagtccctgagtattattaattaccagtggctgcaatcaatgcacaaggcttgtctagaaagctatttcctccttaggtgaatggttgggaatacaatatatggtaatcaacaatttgagagggctgagcatggattgaggctgagaaaaagctgggacttggcattgcatctctcctgtgcagatggcagagaataaatcttgactttgcaaggaagataaagcaaggtggaggtgttttcatcgcaatcgcacagcacataaatggcagagagaagaaagaaacctcggaacacgggcttcctctccaaggacagctactgctgttttggagaaagcttatctgctcttatttcaccatgagagaacttctgtcctcaagagccacggaaagggtaccagaaatagatgagagcccaccaacaaaaggaatgatgaagtggccctttaaatataaatctctggcacccccaaactctctggatgttcccttacgtattcaaatgagatcgcagcgtcagattggtatgcattaggctggtttcaatgaaaattaacatgtaattgcttcaaatgaagtaagtgaggaggtaatctgttcttaaattggattcccgggattttgtggtaccataatgcagctgtgaaatgaaatatattttaaggatgatgtcctcaagggggtgaaggggctgggagggggaggagtagagatagatagtgtatagtagaagcgcctctccccccagcctgccacattctttctctgtctcattctccagtttccagcggatgaaaagatgttctctcatccatgggtggcccccatgctctgggccctgggacctgggcagacagtgccccacattggcatcagccggtctcctctacttcttactgtgtctggagcttattcccagaggctgtagctccccagggctgtagctctgtggtcaccctggacactggatttgtaaggagaaggtgctcgtcctgcaagtggtgtctactgagatcatcaatggctgaagggtgcactgctacagttgggcaaattttccaaagcacactgtgcagtaagaaaaaccatcactccttgtactcctggaatggggacatgtgcgcttgacatcatgactgacccttctgatatcaaagagtggagctggggtcgcagcagcaggaacagccaattccattaccaccaccggcctccacagcctgggttcagccagaccaggcacccctgccagcagtgatgatatggtctgtgaagtctgaagatgagcctgggaataattaaccttcttaccgttcaatcaggacgggaagcagctgggtgaggagtcagtgcaggttaatgcattaaattgtttgcctttgccatcctaggctgaaatgggattttcagtcacaatggaaataagctggcagtcttctggtcccgtggcatcacgcctctctgccaaagagccatatctgatgggctttggggaccttctgcaccaaggctacagaagggcagagctgttaaatgaaatgcaatcacctggcaatgcacaggcagtgctgggttagggttcacacagcagagcagtgccactggtctagaccgagtccccatcaagggctagcatgagaatggcatggctgccttgcatcagctcctggggagatgcagatttataacacgctatataaagagtatatgttctggtgtaaaaagcccccatcagagctagagagaagggaaattgacaaatctcagaagaatgcgattctgggcattctctattgcacgcgaatcaggacccccgtctgagccccccgcttgccttccctcccagtcacagcttggttctacagctcggctgatgattttttttttttagttcttgtctttgtttcctcctgtttatgttgctattttctttctgcacatgttgagcagctctggctttaaaactgatcagagctcatggctccttcaaatgtagacgttgtattgctacagtctctcaatatatgggaccaagatttttgagagaatgccagaatgtttctgctcttcccaggagttggtagacttagaaatttgaagaagagaaaagggaaaagaatgagagtgaggggtgacaaaactcagtttacccgactgagtttaggtctccctaaaaacagtggcctgagacactttagacccagctaatggcttttatttcctcctctaaggttgcaagagacagtgtctttgctgtgggcaaaagagggaccagactatgaccaatgattaaattttgaatcactccatataaagaataggacctcttttgaagaccaaatctgtaaaccacattggataaatcatctatgttgctggctcctttctttcttcatctggtagtaggcatagaatagtatttgcctccctgcttagggttctgcaaggattagtaggcgttaatatccacaggagtccccagagagagatatgccaatagcaagaaaagagagcttagcgtccttttctagattctccgtggatgtggaatctactgtacagtttatttgtcgtctgaaccccaaggtgcctcttggtagagtatgcataggctgctgcaagcttagctctgctggaagaggtgggatggaatgtattttgtggggagtgcgtgtgtgtgtatgtttgagagagagagagcacgtacactcgtgatttttccatgatctaatatcttgaattaatcattgtaatgcctttttctgctatcaaaatatgtccagtggtcaccttgatatgctcatctggtttaactctcctcaaagtttgcagtgttcacaggagaaaagtagaaggggccagcggtttcattcccattttagagatggggagggtttcaccgcaggagcctgaggatatgcaattcatcttaatcactaaagttgtctcaggcaatgacctctataagcccttcttccctggacctcatttgctttgaatatgaaatcagggtcagggtgttaatgtcctactcttaaaatgcaaactaacgtcaaggtctaagtataaaaagtaaaatataaaacaaaatgcataaagttgtaccgactgtagataccacagtataacagaaaatactgaaaaaaaatatgaatctcgtataagactcctggggtcaacagaggcgtgatgaaatgcaggagatgagggacaaatggaaaatgccccagctccatttatttaagtaaaaagactatgaagtacagaaaatatgagtgaaaagctggttcattataggatcctgttcccagctctattcttgccaatctccctttgacctaagaaatcctctcctgtttctctcttaaattctacctcagaacctttaattctcattttattttcctttcccatgagtcatttgtgtcctcacacagctctgtgtccctcgattccaatgggcagacccacccctctgttcctcccccctctctcgaaccagcctagactattttgccaatagttttcatgcataataacttaagtgcatcacttttctacaaacatgttatcattagagttcaattcttctgctcctagcctttgtgcctggtaaatatacttctttgacgagtgttttggaagatggctccattttatgcatgtgcattagtgccaattgcacaaagcagaaacacaaattacctgtattctgcagacagatctaatcacctagacaccatgggctggcattcattgcagcctccacctctatgcatgaaactgaaaggggagcacctaaactgcctattaatttgaaatgtaggcaaagtgctataggcgctgaattgcgtgtttaggaaagctgtagcaagccattgtgctaggagccgtgcactcggtgtgggcctttgctccgaatagacagggcttctctttgggaagatgtagggctggggcgctgggaccctgccaaagtgatctctgcctgagactggaagagaaatgagataaataaacaagggaggccaaagtggggtgtgccccctggataggacacttggaggggtagacgtggattttccccactatggtgttctgtaagattcttttccaactggttttatttcaacaactctgtagtcagcaaatcggcctcccctggggctgttaaagtcaaatccaggaggttttcataggaatgaatacttgtaacctaaactggggctgcgcctactgtcagagttcgtgagttttttaaggatgcctgaagatgtgcctcaactacctggcggggaggaaaagaagtcccctctgtaaatgagctgacacttgtctgataaaagtggtgcctttggtctgatcatctgaggacaaataagcagcagtgccacctcataaagggaaggggtacctcagagccccaggggtgtcctgagcaaagggagcactttccacaccagctgtatttgggaaatctctcagccagggactcacccctttctcccaaatctcctgagctccttagttggcgtttctttaaagatacttaagtttgccctgttcagaatttttctgggtttgtagcttgtcacagtggtgcccagaattagattcctgttgccttgtctcacacacactcacacacactcacacacacagactcactcattcatctaattggaaacaaaaagagcaagggagatggaaaacatggactctagttgttctccttcctcgccacgttgaatgtatttcctcatgctccccctggctggcctcctcctggcacacttttcctatcttctcttctgtgcatctccccgtcagccttgcttctctgcatctcactccccctttgcttctctctcttttctctcatctgcaatgaggctgctcaactgccagagggtcagaactgtgagggatcagcatgagggccacattgacaaggaaagctgtcatcaaattttacagcttcatgtaaaatgcactgtccatggcaaggacagagaagggactggaaaggcacagggggcagtgtggggagaaggggtagttagaagagaggctctctcgtaggtgaagggggaggtaaacctacgtgctttctacagaaaggtattcatggaggcaaatctgccatcttttctaaacacaaccatgtctctggaagcctcactaggagaccaacaattaataacagtgtcagttatggcatgtctgtgtggtccattgcatagaacgacagaggaagctgatccaagctttgagtaccaggaagccaagggtagcaatgtggatgggcctatggccgttctgttttcggcgagagctagggaaatcccctgccactggtccttcccatacacaatgctatatgcgcatttgatgagccagccaacaggtgcctgagtacctgccgtgagaccagctggcaatagctcctctgaggcacagcagaatggaccgtgtgctaaaggcatcaacagcctgggcaggcaaacaggaccagcccaggagagtccattagagaaccacgcatgtgccggttactgaccaagagttaggttcctacgtgtgcacagccttcccccagattccattccttaggactctgcacccatcccatcccactttctcaggacagaaaccacgaggcagagttgtaccttgccttagagtgtccgtctcctggagaccgtcagtaggatccagtgcctgctttgtaatttagtagctttgtgacccgaggcaatttattaagtttcagttcccttgcaggtaaagtggagatatttttgtttactaccacacagagtggccgtgtggctcacataacatgatctgagtaaagtgctttgcatagtgcctggcacactccagtgatcaataaacgttagtcagggtcattattgtgctatgccccttcctttctgctattgcccctcccatccccggatcttcgatcgggccatgggttctacttcccggtgtctcctgtctccatcccttcctgtccagcccctggggccctgccctccctgagatctcagcagccgtggctgggctggcttttggtggttttgtgagtgctctcagtctgcagggagagacaggctccaaaacacaggtcccagcacagtgccgccctgttggaagctcttggcacctgcgccttagattccttaacataacttaaaatgcccttcacgaaagtacttctcttcacctgtccaggtttgttgcccatctgcctccccatttctacccaaatcctactcagcagctgctcacaataatgattctcagttttgcacatcagaaaaagttgtggaaattgttctgaatattttttgtgtacgtgtgtgtgtgtgcgcgcgcacgcgcagggcggggttgcttgggtaatttataaagtacaggcatttatataaagctccacaatggctgagtgtggtgtctcatgcatgtaattccagcattttgggaggccaagtgaggaggattgcctgagtccaggagattgaaattgtcagcctcagcaacataacaagaccctgtctctacaaaaacaaaaaaacaacaacataaagaaaaatagctgctcctggtggtcctagcttctgtactcctaggtactgtagctagcgccagttgtctaagctactctggaggctggttggaggctgcaggggtgatgattgtgccactgcacttcagcctgggtgccagcatgacatccatctccaaatgaataagtaaagcaagttctacaggtgggcctgatttgcatcttgagttctagagcacaaccttcccagacacaccctgccttcctcacactgcccgcatatctgtctacactcagtcccagcaaacgcaaacggatgggctcacagtggggatgcaaacaaagatgaggcgactgagtgagtgaatcaggaaaggatgttttcattttattgagtgaattagactaagtcaaaccctcccttagagtgtaaagtagaagataaataatgtactggtgtgtgtttgtgtgtgtgtgtgtgtgtggtgtggtatgtggtatatgtggtgtgtggtgtggtatgtgattgtgtagtgtgtagtgtatgatgtgtgtgtggtggtgtatgtggtatgtggtatgtagtgtgtgctatgtgatgtatgtggtgtgtggtgaggtatgagtgtgtatgtggtgtgtagtgtgtggtgtgtgatgtgtctgtgatgcgtgtgtggtgtggtggtgtatgtggtgtgtgtggtgtgtagtgtgtgctatgtgatgtatgtggtgtgtggtggggtatgaatgtgtatgtggtgtgtagtgtgtggtgtgtgatgtgtgtggtgtttggtggtgtatgtggtatgtgtgtcatgtggtatgtggtgtgtgtgtcatgtgtagtgcgtagtggggtatgtggtgtgagtgtggtgtgtagtgtgtggtgtgtgatgtgtgtgtggtatgtggtgcgtgtattttgtgtgttgtggtatatggtgcatgtgtgttgtgtgttgtgtatctgtgtgtgctgtgtggtatgtgtggtgtgtggtgtgtgtgtggctgggtgtatgctgtggtatgtggtgtgtgctgtggtatgtggtgtgtgtgcgtgcatgtgtttgtatgtgtgtgtgtgtatattgtgtgtgtgtaagagagatcaacaggggtcccaggcaagggggatgagtgggctgttggcagaggaagaagcgcagcccagcaaaggtggagcctcgctttccataagcagcttgggtccccaggcgcccctgcgcgatgtgggagtgggagagactgagtgggcgcaagggtctcgccacctgggtgtgtgaacgagtgcagaaatacaaacagctccgagccagaggatccttagtccatcaattctttgcagaagaaaagtctgatggattgaaattgtcacacaagaacgctgtgaacaatagcagggagatactgtttctctccagcccagctgtggtgagttacttcttaatggcaaggtagggagacacacaccacggacaatgctgagggtgacaggagatgcctgtgccagttatttattatgggagaggaaggtgttccttctactttttttccttccatcacccccttcttttctgtgataagtgggggctgagctgtttgtgttatgcagaggctgacaaaatgaggcgatcagattggaaatcaaagctctcaccatggctggcagtgtgcggggacttcgcagccacctcccatggcgggggcaggaggagggggaggaagcagctgctgtcatttctcccctagcagttgtttttggttttacttttatttctcccaagaggagaggagctggagagggcagccaaactagcacaagaaagaaaaggagaaagagggcaagaatggaaatgcggaaggagaaagagccctaccaggaggcaaagggagagggaagcgagaaggagggaagaagcctccagaacgtgcctttttccgatttgtgctggctgcgaccttgcagcctgtttctctgccagctgcccctcctttgctgtgagaggtgttttctgtgacccgcaaagcgtggtttaatttacagggtgagttggaaatgattcaagcatctgctcctttcaaatgttgggaaactgaggcacagcacattaagaactatttaacttgcttctttcgggccttattgtcagtcttttttcttgagagttccagaaactatttccatctccagctttcaggatgaataacttattcaggcctttgcttttctggtgcgttctcccaaaactcctcctatttcaaactgccccccaaagtccctgagcctgagtcttatgggttgactctgccctctggtggatcgaaaggtggtgaatgaggcagaaaagggagctcgttccagaaaaacataccttggcaggcttcccaggaaagtctttggttaaagcaacccgaacccaaaatgaatacagctcaatatgctgtgatgtattaatatcctgataagcgagtcagaatgtgtttccaaatagacctattacataagtggcaataaatactaacccatctctcaccttgctgcggtgagcgcatagagagggatctgcagtgtgggattccaggcagtcttggcgatgctgaccttctgacggatggggaggcctgagccctctataacacaggtcccctgtgacatccacatcacacaatcgtgccctttgcccacctttttaatgactttctattttgttttacaaccagcaatctgctgcatgtgctggtcaacagtatctatcttttctgctgtggcttgctgcctcggatgcttttatgggcattgattccctccactgcttccccaaagaggttcttttccttgagccagagcggcattccggcggattacagtgtctgccactctgctctccgatttattgccatcctgggctttagtctccctacattcacagccaagcctcattcattttgttttctggggcgagcaaattgaagaagttgctattaataggagaaagagtgtcatgccggcagacttagtagtgtctaacgttatagcctgcaagtcccagagccaagctcttgtcttagatccacccttccccatccaagggactgaaccaggtgggatgctggcctgggcattggctctctgaaagatttacacttttctggcttttgtcgacaaaggatattctcatatttgggcactctcatccatatgtcctctccttttccctgtgaccatcagtttacatttggcagaaggctgtctggggttgtagatgaagtctgagggcagatggctggggacaggacgctggagaggagaagcacatggcagtggtataggatggtttgcttctcagctttcccagacactaaagtatatgaatccaattaaagttgttctgtgagtgtgtttttttttttacattgataaacatgtttgctaatcatttatcacaaattaaatagtagagcaatttctaaacaatgtcctacagataatgaatgtcttttgaatatgcatacacaatgttacatctcaactgttgctagtcctgtttactctctcagctgtagaatttagaggctgcctggggactgtagagagcaggacatcagatgttgcctctccagggaccatcctcagatctttgtggactggccccaggctgtccagatgtatatctccttcatgcagaaacaggagcctcaaagaatcttccagtgggttatagttgtgggtgtaggagttcacccaaccaacttaacttgccaggtgatcacacaggtacaagaggctgataaggggctgggcatggtggctcacacctgtaatcccagcactttgggaggctgaggcaggtggatcacgaggtcaggagatcaagaccatcctggctaacacggtgaaaccccgtctctactaaaaaaaaaataataaaaaataaaaaaataaaataaaattagccgagtgcggtggcgggcacctgtagtccccgctactcaggaggctgaggcaggagaatggcatgaatccgggaggcagagtttgcagtgagctgagattgcaccacttcactccagcctgggcgatagagcgagacaccatctcaaaaaaaaaaaaaaaaaaaaaaaaaaaaaagaggctggtaaggtcagaaatcactatcgacagtgtagaaatttttctttgggatgggttggtgtcacaagtcccagcaggttattgagtgaacaattctctttagaaagtgccgctggaaaagtgtagtttgcaaaagatgtgtgtttgtgtgtgtgtgttggtagggtggatagggtggggtctattggtcatatattctagaagaggaatttggaggtggctgtatagggacttggtatccaaaactgtttgcatttctggaagagcaatgttgtatagtgcatacagctgtgtacgtattgttactattgatgctctaagtgatagtttagaaccaacttaggggatagttttcctgtgtctcacacatatattgattcagagtctctggcactatcctcagtaaggtaacaaagggaagcaaacagatcccaggagccctgagttgaggtcttgctgttcccaatcagccgatgtatcagaactctgggtaacttgacccagtagcttaggccctgcattcccattctggctttgaagacaggagaaatgtattttaagacagaattcctaaagacagacctcaggtgggtttttcatgcctacctagaagtaaggttagcttcagttaatctacagcttcctgtgggctctacctcaaagtcatggaagggaagacttcttaggaaataaaaactgatttttgtcattatttttcttcagtgcacacacagaatatctgtcctccaacaccagtcatttcaaaatggggctcctaggactgtattagaaagaccaagaagagcatacagtacaggaggtaccaaatggatacagcctcaacattctgagctttgccagaaatgtctgtctgtcttctcccactgtttcctcaattctcttcccctttttcatcttcacctacctccattttcttgagttttcttgtgcagttttggtcaggctttttattgagaacaacctcaactcctgccaatgactttacagccttcctctttctctctggatgttcttaacaggtttggatgaagctgaaatgtaaatgtatctgattcttaattagaagaattcaattccagagtctgttaggactttgggagtaggagatttgttttcacagtaaatattctcagaaggagaagggaacctagtctgatattcccagaggtgaccagtaataggaaatcatcttgacagatgaaaccactcgtatctagaaatcagatgagtagcgggatgagggaaagacagtgaagcctcggaagtgggagttggttcagctttgttagggagatgcaaggagataccacaccagtcagagaaagtcataagatcaagaggtatggaatgtggctctcaagtggaaaaaaaaaggaaggtaccgcattttccattctctgccttgtttttttaattcccgtgataattacaatgagaggagcaatcatgttgctaattttacttcatgcgtttaagttctaattaatactatctggttcttctgcgttctgctgaggtgaaatacagcatgctcctttgcacttacacctttctttctctcaagaatttgcataggaagtgaaggcatgtttgcatgtatcgtattttagtaattggcatccctgccttcacagttctacaccactttctagtctaatctcctggacctttcctctctccattcaccttggcaaaagtggaacagctaggggtttcaaacagccctgcccctcagagaatagggaagtctgatggagttgccggcagcagacctaagccgccagcaggctcttcatggatccccacagagcaagatgggagatttctcacggtgagaactgcacggctgaggccgcatagacattaccattgtcctgtacagaaaaggaaaccgaggcccagggtgatgaagtgacttgcccacgatcacacatttcatagcctcagatctgggatttgagatgtgtctctgcctccaactttcttatgatgatgctgtgagatatgaattatatgagaaagggctttgcatgctgtcatgtgcaaggaaagtttgagctattatttttctggttaattaacaaaaacattgtcatgaaatgtctgctgcattctccgttctcattttgaaagcttttgtggagcacaaaatgttgctttgtgacttctagtggcatagctcacatgtgctatagatgcacgcgtgttatgcttctggcagcccggtgtgagtaaccatggaaaacagttggagaggtgccagtgttggggctgagtgtggggccagctattgtctcagagacacctggtttaggacagatgcctgctgcagtgtgccttcacttcaagcaactgatatttactgactgcctgtgataatgaactaggtaccatggaaggcacaataggttgcaagaggattatggaaagaaagataaagaaaatacacaggccctgccttcagaattgccatatgggctggcaaaggttatgatggaaccctacgaaagtgcagccttgttgggtcagagggagccttgtgaaggaaggggtgtgtgggcgagtaagtagggaggggtgctgtagacagaggggcagtgtgggaaatgggttggggcatgggagagcatgccacactaaggaagctgcaggatcccagacctcaaggtcctggcatgttcttctgaactctttgagcttcatcctgaaggcagtgggaaccactgaaggctcttgaacaagtgattctcaaacagatttgttagaaaggtccctgcggcaaaaagagtgactggactgaagagggttgcgtgtgggaccaaaagagcaggtggaagaggccccccgctcccactgcctggtgttcagaagatggtccattgaagcttaggaaatgatttgagcttgtggttggaggttcaaaattagagagaatgcatgcagggaaataactagctcttctacagcctggctagagtcccttcctacagagaccagttaatagagagcatcatcaaaggcaccaagagtttccgtaaaggacttagataattatttgcccagtgttggttgaaggaaattactttggaatgaaccagctgatgcagttcaagtgcccgaggatacattcctctgcctgacgttttatacctgtgcgaccactgccccgcccccatctgctcccccaatccccgtcaggatcctgcctgctccttccaccagggtgggaactacagcagagtgaaggaaaacagccctctcctaacggcttcctttgtttggttcagacttggtcattgtactttgagagttaaaattgggtctatttctttctgtatccgtccggtgtttgtcattcaattgcctgtgcaggttctctgctttatttcatttaagtagctgttatcttctttgtatcataagctcctaaaatatagagtaaggaatatgttttgttctggagagtgaacactgcatcttcacaggcatatgagctcaataaataaatgtgtaatgttgaacatagtgatgtagccatgtatttggttacttggaaaataatagggaagggagggaacgatagcatccgcactcagaaggtttgtaaacattaacacctccatgctcctgcggagtccttgatactcttcccctcaatacttacatggaccctcattacaataagaacagggtggggtagagaccatttttccccattgacatatatgaaaactgagtcacagaaagactacggactcaggcttgtcgcaacacaatggaaaaagagagaagcaccccactggactccatggaaatcaagctactaggcatggttgctgcctctctcaaatatgaacaagcaagctgaggtgatcgcaggtaaaatatatgaatgcatggcggcttccagatggcagaaatcttgttaaaatctgagtaacacccagtgcattgtcaagctttcaaaatgttcattgcaaaatcttacaatccactcaccccagaaaagactattactaattttgggtcaaagaatcaggagatgctcgctgtcatccaaaatctttcttgaagtaagtagctaagtagccttaggcttatgaaagaaagagctgcacagacttaacctctgtaggttccttattgataaattatctcccatgtctctcccagcaccatatttatactcatttgtaaagttctcagcagaaacttcacttctacaagcccttccctgacccattagactaggctgggttcctccacacacgtctactttctgcacaacacccataatttcctatcataagaaacagcacacttctgcattataatcctgtctttctgtgcctctctgcatgagtctgtcttgtttgcctctgcattgaattccttaagagcttaacacaatacatggcacataggaggtgctcaatgaacatttggcaaataaatgggcatataatcccatcctaatgcacttcagttcatccacatctttggagataactgcctgaagtgaagtttaaggggtaagttagaagcacaggtcgggggatggctgtgagttgaaaggttccccgggggacctaaagaatgggccacagagacccctgacacacagccctccctgccagccctgtttaggtggattccagcaccttaagagcatgtctgtttatatgtctgatggtgagaacgaggcctaacgtatttgggaaaggcaactcccaggaagaggacgtttccatgcttctgtttctggcagtgatggacttccctgcccccattatctcttcaccctggcttacttctttattgcttccaaatatgatttttctcctgccattcggctctgcttatctgctttgctgctgatgggagcatacttcccagcctggcatttgagggcagctacagctgactctagtctttcttcctcggtgttctctctctgctctcatcagaccaaacctttaaacatctgccccagagccacacccaaatctttattctttgtttgtttaattaattaattaattttaaacagtctcactctgtagctgggactataggcacatgccaccctgcccagccattttttttctttttttgtaaacagggtctcaccatgttgccctggcttgtcttgaactcctaggctccagccatcctcccaccttagcttctcaaaatgctgggattacaggcgtgagccaccgtgcctgccccatacccgtatctttggatacctttttcttcctagggggaacaccttctcacctcttttctgtttattcagctgatcttttgtttgtttggttggcttttatttatttatttttttatttcagtaggttagtggggaacagatggcatttggttacgtgaataagttcttcagtggtaatttctgagcttttggtgcaccttcactcgagcagtgtacagtgtacccaaggtgttgtcttttatccgttgccacccctgacctttttccctgaggccccaaaaaacaatgtatcattcttatgcctttgagtcctcatggcttggctcctatatatgagtcatataggaatatatatgactcatatgacatttggtttttcattcccgagttacttcacttagaataatagtctccagttccatccagtttgctgcaattgccattattttgttcctttttatggccgagtagtattccatggtatatatatatatatatatatatatatatatatatatatatatatatatatatatctcacattttctttatctattcattgattgacaggcatttgggctggttccatatttttgtaattacagattgtgctgctatatacatgcgtgtgcaagtatctttttcgtattatataatgacttcttttcctcctggtagatacctagtagtgagtagatctacttttagttctttaaggaatctccacactgttttccatagtggttgtatttttattattttattatatcctttattagtttactgtccacatgctcctgccacccactgaactccccaaatcctcctcccctccccacagaatgtccctcgttagtacctaagcctggctggattgtgtcccctcacccctgtgtcagtgtcccaggagacagaaatgttcttggcactccaaggtctcttaggccagggccagaagggcccccactcccggcttctggctgcaggctctaccttgccccgtgtcctctctcccaggggcagggctcacctgtggttgcctgctcccagtgcctgactacagaccaccctccatctttctagcaccttcctttccttgcagcctcccaaatatctcacactccctctccagaagagttccttctgatcacaaagcatttgtgagatttacacataagattgcctttgttccagttctctagaggcagattctgggatacggatttgtgtggtcatgacttattagggaagtgggcctaggagaacaggcagaaggtgtaagggaagccaggcaggacagggcaagaagccaagtggaggctcgattttaggcaaagacccaccagggtgaccaggcccttttacaactcccacacaggccacacaggctactgctaggggccaccctgggggacgcaaaccctaggcacttgtggctgtctgtggaggtgggggtgcaaacagagtctcaggctgggctgtcagaagcagaagcacccagaacccagggagcacacagaaatgatggaaggggccgaggggcctgggctgaaggctgacttcctgctttgtcctgcacagggagagagagacagggcagtggctgtgcaaatgatgaggcccccatcgaggtgagggagggctctggaatgacaacaggccccagcaaaggtagtgtcctcccactgggagctttcctctttctggggatgcatcttgttccccaaggtgccacgtcacctaggttaactatctggagagatccagttaccttttctgcacttaattactcacattttcttgttttagtgagtgttgtctttccagaccctggggaccccttcctctcagcctcctcacagtccactagagagaggagaggcttctgtgggctctacaggatagggacagagaaggatgagcctccagcccctgcagtgtgtattgcatgttggtcctgctctcctgtcccacctgtgtctcacctccgtagatggtagaaatggagctcagaagccagcagcctctctccttggaggatgccagtccactcacctactgtgcctcactctcacctaggccccaggcagtcatgtgggcactgtgttaccaccaaaggtgagaggatgtgttgccaaggtcacttagtgagagaacagacaaggcccacctcgaacccaggtgtcccctttgtccctctggagttctagttgtatttgacctttcttcctgtgaactgtggggtttggatacagcagagactgtctctttggttgtgaaccagattccttctttccagccactccctcccaccacacatggccacacatgtacatcatatgtgtacatggtccctggggcaaagatcaggtggacaggcagtctgcctgctgcccagttcgcacacatgggtgccaggcttcacacacactaactggaagggaaatggcagctgcatgtggtctggggtatgattttggtctcctaagctgtgatatttttttttcctcttcaagtcatgttcaagttctaagtatggatggtgctttagggtgataggagtgtgctagaggcaggatccaggtcggattctggggtttgctggttaaagtgtgtcttgacaaagaattggaggtggaactagccccagagatgaagccaggagtgacacacatgctggcttccccagaggccagtgcatctccttcatagtcgcactaggccttgggcatgggaggagcaaggtaattccagccccttttctagtgtgactccatgtggctaatctatactgttcttcctagtttgcctgaatacatcctggtttaatcagtgtaatcgcaaaaagtgtctgatttgaacaataatcagtgtaacaatcagtttaatcagtgtaattgcaaaaaaaagtgtcgatttggacaactgccaggctggcctaacttgtccagggactgaatgaagccccatttcttcatccagtgtgtcccatagtatggggtgacacacactggccagtgagggcaggactggagacaaagcaaagatggaggagagcctgcagatggatttgtttcagggactcctgtttcttcttcgcagctccttccctgccaaggagggctgtcccctggagaagaaagagacaagctcaagtgtgctaccatctataaccatcagtgattctttgagctggcctttgcagagttcttcattttggttccctgcctgctctttgtcttcaggataaaatgcagactctttctttcacgagggcttattgcacaacgaacctgtaatagtcagggatcctacagggaaaagatggcatcctcaaactgggtaatttgagcagagtttaataaagtggatatttatgaaggtgcagccaaggtgtaggaaaactgtaagggacagtcaggaccctggggccacgaacaggaaggcactgttaacacttttaggcctgaagggataaggggaagaggtcatggctgccaccagactttgatggagggatatagacagctggtggatggaccctgcttcctccccaaccccgactcctgccactgcttcccagtggcagaacaacaggaggccagagggcagggagcctgtccacgcgatccgtgctggtcggcctgcactgggtggtggacttgcggacacacagagagcaacgtgctagcttgctggctttgtccctgctaaattttctcttctacccatgccttctattccataagctccccgtttccatccttccacaaactcgccagtattttccccagctcctttgtgctttgctcatgctcctcctactgctggacatgctgcaccttactcctccttgctgtttaccaagctctttccaaccttggcagccgcctcaacacttaccaagatccaaattgccctgaaagcaagcacgagtcatgtgtgagggttcttggagtagagaaaaaaattgtatctacttcctgccttcccagagttccacatatgacaaaaagataaagcatggacatcctgcttccagtacacaccaagataaagtatgtctggaaaacactcatgggggaacagcaaaattttgcagagaaaagcttgccggtatatgaattaatatttaagcttgaccttggtgtggcataggaatttgtctaacaaacaataaggaagggcattccaaataaagcaggaagtcacagaattcccaatgtgaacagaatgtacaggaaacagtgaaaagtggtccggtgcacctaatgaatgtcatgttcgaagcagtgtggggtgggagtgtgtattagtctgggttttccttttcaacagaatctatctatctatctatctatctatctatctatctatctatctatctatctatctattctaatctatcgagagacttataagaattggctcatgtctgtagtgtaagtttcagtctcagtccaaaggcctgagacaaaggagctgatgcccaaggacaggagaggaatgtcccagctcaagctggaagagtgaagtgcccttcctccactctttcattctgtccagaccctcagtgtattagatggtgccctcccacattggggagggtgggtcttatttatgaagcctgctgatcatctcttctagaaacacctcacagatacacccagaaataacgtgctaccagctgtctggcatcccatagttcagtcaaattgacacagagaattaatcatcaccgaaaatgaggtggaactttgtagggatcactcactgaagtccaagctccaatggcagatggagtccagcgtgaattcccactgaactttcggcacttctgggctctttcctttatgaatggttggtctccatgacaggattccagagaccactcttctgtgtttggactgttttgaacatgctagggaaagaaaaggaaagaaaaacatccaggttacctagctttggtcacctaggggaaaaaggctccactgtctgtggctctatgagatgatgaagatgccccaccttgcccaggttaccttttgctagagtttagaatttagagttcttggctacatgtgtgtaacagagttattgaatcaaaaaaatggcttgtgggagccgtgacttacaaacaagatatgacctattgagcaagcccattcttgcttcagcatttaaattagtgttgggcttttgttgtaggtacaaatcaaagtgttgtgccattcatttcagaaaagtcacggcccaccaaactcaacagagtttgttttgagaggatactactgtatttgacagggacaggaaggacaggtggtaggtgtgcttatggagaattttctggaggtgcacagagcaaaggcttcttgatttatccctaggacattacagaagtggagggggactgcctccttgcacgattctcacacacagtgaccaggtgttgggggagatgtgtgcatttgtatttgtgagtgcaggttggtggggacatgcagagtaattatactcacacactgggcctttattggatgcaggcctcatggtcttttatctctcgggagtttgtgaaagatgggagattttaatcaaataattaatcagtggacagatatttattgtgtgcctacgttgtactctacacaatgttctgtagagacacaagtgaaaataagacatgatccttgcttttcaagaacttaaaatcaatcaagtcagcaatgttacatccctaagatgagaaagcagtacatgttatagactgtacaataggtttatttgttgaatttttacaataaacaaaagaatgtatttacatgcatgtttccatttaatcttctcattaaccccatgcaagaagagaggttatttctactgcaggtgatttaaatgaaacccagtggagtgagataacctctctgaggcctgaggggcatcaggaacagagctgggacattccttgtagcagtcagacttcagaccctattctctttgctctcccggagcctctctctgactacaactacctcctagcggtgtgggactcacagtgcagtgtgtgtgctgctgcttttggttttgtttgtttcctttttcctccccctaatcctttcacctgtatcataagtgtgctgtctgcttctacctaggcatgatgagccctcttactttcatagctaggaaagattccatggcctacctccgttttcttatgtcatgcaaaaatggtaatagttgggagacgtaagaacagtgtgcaatgtgagtctaagtctagtatttttgtctctctatgacccagatcaattttgtaaacttccacacaagtttagagtctaaaagaaatccagtagggtcaaaattagcagcctcagtagtgacgctttctcttacaataaaggagtaaggtgctagctgatatctgaatgttcagtgtcttcgtggggaagtatcctgttttgttaatttcttagtttcccccagagaacactttctcacaagcgcagatgtggaagatgtacacgccaaccccatggcagcgtgtgtgggtatttctgagccatttgcgtcgtgatgttcccctatgatgcttgaggggaggggcagggcacaagccgaatgctcagaggcaccaaacttaggggcagctggagcatttctgtgtgataagaggcaattgtgaccaggtgctgcgaagggcgaaagcacttattttgctgtggcttcaagcattgcttgagatgcgctgcctttcagacacagttaaagggccatttgatagaaggaacggttggaccgcacactgtctgcatccattattgccctcagatcttcaggcaggtgtgtttaagaaaggccaagcctggatgtttctctcttttttcaataatctatctccttattgcaacactctctttgcccatctttagaagattccaagcagacacttttgcttctttttttcttccaattcccaggttctctctctctttctctctctctttctgtctctctctctctccctctctctcccccctacccctctctctctatctctctttctcttttctcatcctaaatccaaaagtagcttcaggacctgagtccatactttcatggttctatttctgcggtgcacatcttgggcttgcttaatcatttgtttttgcttttcctctatgtgtaaatgcagcatgtgtaataaaacaactattcatcagagagatattcaggacacagagggttgcatttttagagcattggaacaataggtgcagctgcagaaaattacaggtatggcagtgttctttctctaccatactcgagctcccatgcatgagtgagcatgtgcacatgtggctggatcctcttttggccaaatacaccctgaatattgacacaggtggggcaccctcaataatccctgctcaaacagtataggcctattctctaaaagaagacacttatccaaaaaaggaacatggtgcagacagacacacacagactaagaaggggactgtggctcggtactgaaatggaaaacacatgccttttccaggctttatttctttttgtctggattcttccaggatgctgagtatgctaggccatgggctgtccacgggggccacacacaggaggggaaggccgcaggagggatgctgatgggaaaaccattcacagagacacagaaggctaatggccactgccagagggctgcagtgcggggcaactggagggcaacattgaagctggaggacagaagggagctggagttgcagggcccagtccagaatcctcaagggaacctctgtccctctattcttcatatatgtggcaggatgggcagagaggatgccagcggtgggagggcggtatatctggaggttgtggacgaaaggggagaggctttgcaggtctgatctgggaacatcctgcccttttgatcgcccatctcccacctcttgttggcctatgttacattgacttgtgactattcctccatatctgatgagcggccatctccagttcagctcacctggatgagtcagggacagtggagtttgaagccttactcactctgacttaatcaccagttaaccaccatcctgagagaggtgagataccgtaccgtgtttcaggagcagttttgtagaaggactatgtcaagggctgtctctgcaaagagaggactcgttgtctgaatgtcccacctccagagccttctctgtggctgagagagcaattatgctcattttcacttttctttttttaaccgaggagcgatgtgtcctctgcattgttgaggagactggatcaatgagacagatagatgggggcaggtgtgaggaggtgacagagttggctgccgaggtacctttgtgatccatctctgcagaagccggcattcattccgtggggattcagcaagactgatacccagcagtgacagtttggacatctaaacatgaccttggatgtgttcagaaccgcagctggaactgtgccaactcctcagagtagtacatcacaggagccgcagaaccatgctggaaattggctgcgttctgagtgctagtgcatctgcagacgaacctctctggccctgtagtgcggtgcagtgttgggggacggcttccgtttctgtcaattttcaataattagatgctcacaaggaagcccaggacagtcctctcgtgttcatcgggaggttgtgagatgccctcgttgtgggcatcaaaaataattattcaagcagtttagtgtttgtcagtcagcgtttcctgcaccatggccactcacctggtacttgtcagatttcagctgctggggaagaaaataaaggactctgcttctggtttccctgaacatatgggttacaggaaagttctctcctgtaacgtatcagaaaactgtttcataccagggtcctttcctagtgcctattcactctgcaactctcatttttgccaggaaacacacgtctaggttagaggttctcagggagctctccagaccagcatcagcagcatttggaattttgtcagaaatgcagcctcccaggccctgcctgggcctactgaatcagaaacccatggagtaaggtcccaggaatctcttttttatcaggtctttcaggtgattctgatgcacagtgaatttgagaagaactgatttagatgttcttttgggagcacctataagaacactaaatttggaaaacaaaacaaaaactggcatgaatcctgcttctacagtttaatatcagcatggtttcagtcaatatggctaatgttttttagcctcagctaattttgtctgtaaattggcaataagtgaacccaaccaagtttgtgagatgataaaatagtacacatagtgggctcatgtagtcaattaacattgaccatgaatgtgaattcatccagtccctgcttggacccaagtgaaggtcagagcagtggccacccttcagattattaatataagctatcctagatacattactagcaaagcaagctgcaaagtgtgtttttgttcttgagagatttcaaacttatgtcgttccaaattcatgtttcagacaaggcagtaccagatggcagtcatggggtctgcaaggagcataagggaaggtacacccttaggtgtagtaagagaggtgcaccctctatcgactgtagttttctccttcttgctcaccctcagagtccattctggatattgtcatcaaagccacaagaaaggcttggatcagttcaaacttcatgtgcattcaggttacctggacatcttattaaaatgcagattcaaatttcttatctctgagaggagacctgagtttctgcatttctgatgagctcccacccaagtgatgctgatgttggtggtttgccagccacacttttgtgtagtgtggtgctagctcagtgcttcttaaaccctaatgtgcacaaaactcatgtctagatatgaacttctagatgtgactcaaggaatgaccaggggccatcagctttggcattacctgggagcttgctaaaaatgcagaatccaaggccctacctcagacctactgaatcagcatctgtacttcagcgaaatccccagggggctcatgtgcaccgtaaagcttgagaaacatgtggagctggcttcacaactttgtttatttccatagaaatctgtggttggtttaaggctgtgttctcaccaccttgaaatccttattcatgcttgagcaaaatattctgtgttcttattttgcactgggccccataaatgatataagttgtcctagacacactgctccatattagtggttttgaaacattagtgtgtgtatgacccaactgagatgttgttataaattcccaaatattctgaatcagtagactgggggtgagactaagaatctgtaataaacctctcctgtgattctaatataagtagtccatgagcactttgaaaggtagtccccagatcttctccaagctaggccttcactcatttccatgctgtatcaggatggtgccagagagagcccacctctcatctgcattgccagaaaatgcaatgagctgcaaaaaacttgttggacacctgtgccaaggtgtttctttttgggcagtatttcccacaagaactctcagcaaactatccctgtgcacctaagtgatccttacataatgttgagacatttacataagcaaagcagaaaggatgcacagtacaggatgtctcatggggacagggggtctcctgaagaagcaggtgtgtatagtagcacttgttagaatttttatggtcacaaaccattttgagaatccaatagaagccatcacccatcctcaatgaaaaattcacctttgcacattatgagtctcacatagtaccaggaattagaagacttgactgagaggtctgacttctatacttctagctctcattccttggacaagtcatcaggctattcagaaccctagtgtcctgatctttaaagcagagaatgggtaagagtgtcaacctcataaatttgttgcaaaacatcaaaggagacattgagctgtaaaagtgctttgtacactgcaaaataatgtatacatttgagacatcattatacatcctatgctacattgttatttccagcattatagtcaggatcaggacactgcttgtaaatttagcctaaggccatggaacagacttgctgtagtaagagagggaaatgaatacagacagaaagacatgatgaggacttggcgagagttgctgggaaatttaaaagtgtagaaaagagaagggagattccacaattcaaggactccagatgcaaaaataaaagaaagaaaatctatttttatatgtgcagacagttttgagattttggaaagtggctttagtctagcagttaaccgaacatttctgcccctgggtataatgaagatgaatagcaatagtggtggtctgtatttagttttgactgcagaagccttctgtgggaatttgctattctgagatgagaggaatgatgtttagtagttaaaagctgggtctctgatctaacacataattattgtgtgacttggagaactagtttagtttagtttctctgctcttctaggctttttccaataaaagattcttcatagggttattataagtattgaatgacttagtgcaccctaaacagctagacataactatgaaggattatcatcacccaaatccttgagcaaagggagaactggtagtattcgaagtatccagccatcctgggcatgcaaggtacctctaggttataactgagatcgtatttgaagtggttctgtgctcaagtggtttgagaagctccgagcaacattctgaggctgtaatcccataagacctttgctgtgttccagaaaagtccacccctgacaaatcaaaggaaatgtatgtgttgggggaagggagaaagacaagatattctagccttgccatgaggacctccctctgatggctgctgtcgtctctcagtcccttgacgtacctgtctggtcttcccttcaggtgcactattgacaaccgggtcacccgggtggcctggctaaaccgcagcaccatcctctatgctgggaatgacaagtggtgcctggatcctcgcgtggtccttctgagcaacacccaaacgcagtacagcatcgagatccagaacgtggatgtgtatgacgagggcccttacacctgctcggtgcagacagacaaccacccaaagacctctagggtccacctcattgtgcaaggtaggtgggcggggcttggcggggagatctggctggccagcctggaaagccttcaggtaaaggtttgttctctgatcctcaacagagatgagttatccttattctacgcatctggggtccagggcacatttctggttgtcattttgcagttagaagctaaattttccagtcattttcattgagtggaactaggaattgtttttttcatttttgttccaataatatattttctcaggaaattatcttgtaattattgctcttcttggcttttttctcccctaagttttagttatttttgtttgtttgttttttgttttgttttgttttgttttttagatttcatccaattccaagactgtgttatgtttaaaaccagacttttaatgcacttttggaagtacaggtatgccatgtccccctccagccttgaacgaaagcagagccaaccaggatgcactgggcactgccctcagctgcatccttcacaagcacctgcttgtttccagctcacttgcgcctcctctcctctcccagccaggggttttggatgccatttctcccatataatactggtgtctgattctccctgttttgattccatcccaactctcctggccttcttctcctcccctgactcctagttcatgaggccttgtatgtttgtgtgtgtgtgtgtgtgtgtgtgtgtgtgtgtgtgtgtgagagagagagagagagagagagagaatatgtgtgttggttatgctctcttagaccctgggaatggagctcacctcttcccacaaggcagaaccagtcctggggcattcagacaacacttaacccggttgaaggattcctagttagtgagcaagagctggcatcacacttggccactttctggctgtgagaccttaatcaagttattaccgtgtctcagggttctctttctgtaaagggggtcaacgtgaggattgaactgtaaacgtactgacatagaaaacacgtagaagagggcgtggcacatacaagtgctatttcagtgttagctatggagctttcttttctcttttttaggacttttgtaatttttaaaatttttgagcatcttttacagtgggtcaaatatcttattttgtgatgtcagcagtatagcccctgagcagcggcatgccagatccagtgctggagccctttcccaggctgatcccgaggccctttcaaccagggacgtgtagctccagggtgacaaactcctctcctaggggctccttccaccagtccccttgtcggtgtgttcaagaaaagggtaaagaactatgggatgattggttagagacagaataggaaggaaggcagcttgagaaggaagaactgaagtgagccggaagaaggaaggggaggcctgctgtttgacagtaggggaaggcggaacttgggtcgtgatcagcactgttgagtgaggcagggtgagcaggactgagaggaggacacatgagaacaaggtgatgctggacctggctgtgggcagaacgtatgccaggggacatgggaatccttgatgctgtggcccaagtttggtcatgccaagtttttattatattttgcttactctttcttccccaaaggaaattacaatggctgtttaaaaaatgattctataaatgaatactttttgaactgatgcatgcaaacagcaattttaaagaaaatagaattgcatagaaggtatcagagtgtattacaaagagtggagtaggtattgccatgtgagatttttgtttcagtttgtgtacattttttaatgtaaaatacattttttattatggatagggaggccaaaaatgcttgagaatctccactctgtgggcagggctggtgaatgccctggtgccaccatctgcatactctaccaggtggtggtttggaagctattgctcagcccccctcctgtcctgccccaacccctgcacacttagtgttgagaaaagaatgcctagcattgacaatgagagactgggaactaggaactattagagatatttgctttaggaagcagggcctcatggaactggaaagtggaaggaattgtgaaaagtgctaatgtctccttgaaaactggatcatatttttgtcattttctttcttcagccacccccactcacacacacccccacacccctgccctgaacacctcgcagaatgcctgatacaaagtgaacatttaataaatgcttattgaagcaaatggctagaattagagccaggtgatcttatatgggctccaagagagacggctgggtgtttttgggggtgagatgatgggagggggtgagaggatggagtctacatcaatcttcactcacatccaagctaatggaaaatgtctaatcccttgctaggtgtttacatctgtgacttagctaggtgccctctcgcatgacacaccacctcaagtattggaatctcatcttgggctaattttcgaatgctgatgggtgtattgatctggaaacaagctgggttaaaaaaggcattggtcttttacacagactcagcccaagctaatccgctgtcgatatgcctggactgagtattatcgacactttaatgaatagaggaccatagttttttcagagccaaactgaccccctcttcaaagcgatcagacaaactaaatagagccagattcttgtgtttctgtattggaaagaggatgcaccaccatcctggattacaaaaaaaaaaaaaaagggaaagaaatatatttatcttgggatcgtttattataccaaacataaaccctaattcccctagcagaagctgactctctggatttgaagttgctattcagccctgagcttctggaataaaagttgggcatattaggttttcaaaatggtattatgatcctttaaaaaaagaaataaaaacagcaacaacaaaaaggaactaaattgatattctgcccatgagtatgtgtatttatgtatatgtagtcaccttcatatctaaataaatccacacagaaggaaggtagtggcatctcacagcattgcacaagctgcttcaggtctggggtatgtctttccccttactgtcaaatatcccatctaccccctagttctctgtactggattttcttcccctgtggttctgatccaatatggttatttcttgcagacagccgtgaggccaaggcgaccacatggagcaagtctctggggcaagctaggagcaaagggcatcctgggggaggagggtgaccctggagccagtgtgggagggagatggagggggaaggcggcagaaaggaggagacaagagaactgagccaagtagctacttgccagggtggctattttaaattaaatttaaattagctacaaccaaacaacatttaaaatttacttcttcagtcacactagccacactgcagtgcttccatagtcatgcaagactactgttcccttgtgttcattttgcattactataaaggaatgcctgaggctggtaattcacacacataaaaaagaggtttatttggctcatggttctgcagcctgtacaagcacagcaccaacatttgcatctggagagggcctcagaatgcttctattcgtggcatggcgtgaaggggacccagtatatgcagaattgcatggtgagagaaaaagccagagacagcagggacggtgccaggctcttttttaccaccagctttcgagaaagctaatagagcaagaactcacttgccccaccccctgcatttatctatttatgctccatccccatggccagacatctcccattaggcccccacctccaattttggaatcaactttccacataagatctacgggaacaaatacccaaactactgcactcctgtgttggacagtgcagagagagaacatttgtgtgaacttccattgtaaaaagctttattggatagtgctataaggggttaccattatggatcagcaggtgttaaagctagaatggctttccatggcttgaagggctaggtatattgtggaaaggagagtggaattttggaaagagaatggaaattttaaatagatggtgctcttttaaaaacaagagagaattgttgaaaaagatggagtaatggatttcctaggttagcttcaattgtttaaaaagatggagtaatggagttcctaggttagcttagacagagaagagtctggagtccaaggatgtacctgcaggagagtaggcagagttcgagggttggttaagtgtgagcatgggggtgatgactccaccaggacactgagatttctacctgtgagctcaggggacatgaatactaacatgtctaaagatcacatggcaaaactgattcatcagcagaggggaatgagttcagatacctggatttcttgactttgagatgccttgaatacttccttcaaatgtgaaatgtaagaaataccacccgtggatttgcatgtcctgaacataatctttttgtccagaataggggagattcatctaaaatttattaacatttaggtctaatgatttccatctctttgaccttagggttttttgcctaataaacataattaataagtggttctctctggagtctagcagaatattttattcctttcaccctcttaatcctgctaccaaaccgagcatattgtacatctgaaaaagccatactactgtctccattgttcctttggacaaggttacatcttggaaaacagagtggataaaacattcagtgggaatgaattgtttggcaagttaaggacagcttgagaagacgtctaaaaggccccgtctgtgtttctaagaacccatgaatggtggtagagcaaaagtgtgccatggttgtgtgcagagtgttaagaaaggtcctccttatccaagtatggaaaactgacttctccattttgactggtgtacctgcaggaattcactctcacttagagacacatttgtatgacagagaacagtagaatacagtgcttataaaaacagggatattagtgtaataaaaaatgttaaaaaagcttttagcctctttgtcagttttccaggccctagctaggtttctcttttgtcactggagtatctaatcatcccctcccttttgtttggtaaaatgagttttcctatttcttgctgggcagaattaatctgaaaatccctgctattgtttgatagttaattacctgcctttggagtcaaacagctccgaagctcaggtaaagaagggaaacacaaatgtctatggaatagggcaggaatgagggaaagaagccaggacattctgttcacttcgtgtgttaaagtaattccagagagaaagggactagactagggagacacccagcccaggcagtgacttgcaaataatggaagtatggccacatcagcccctaatttacctttgattgtctccctatttctgactctctctcttacccacttgatatatacaaccgtgtttctttccaatcctgaataattagttgaccttgtcaagcaaaagctcattattatgattcagagaacaggaacaataacttttaatttctaggtagctacaccctagagacccctccccactctgaatctgaactgaaggtaatttgaaacacaaaatatcaaaggaaataatgtgacctaatccttactttgaaagcaaagctttctgcctctccagacatgtcacccagaaagcaccatgcccttctggcaggacaaggctcccggagagctctgcagatctttgcaccaacacttcccattcaagcgagtcaatggtagaggaaaacatcatgatccaattcgaaatagactgaagtcaccttctgagaacatctgtgttctctagatgtcagtagccctgtgtgacagatagtgggggcatactgatcatcccaaactgctttccaatgacctctctttttcctgtcccattcaagaaatagatgaaaatgtatatttggtctggtcataagactgtgtgtctaaatttgatagaactttgaaaaagtcaggaaattaaattccactataaaattggagctctcctcaaagcaccccggagaatgacaaggaagtagggcattttacctgcaattgatgtacactatctagacagcatgcagatgaggcaactctgttctacctggtgagttttaaaatttcttgaagcagttgctgacaacggagggacaaaaattgacagaaaggctagagcacatttcagtaaactcacctgaggtatcgtctgtctgctaagccaagtagggcaaaatgtaaagactaaagtaatctcagaaaaatgccagaggaaaagttatattcattgaataatggcattttcttttccttttggtatggctgggaaggggtcctcatgttctctacagagtttggaaaacttggcgtcttttgcagaagagtggataaaaatagggtcccctgttctagcctttcacacccactcatagagaatggagcagaaagtttagatgacccttatggctttacagcaagcacttacagaagtcaggcaacatctctccaggtaagcagttagggctcccatgggaaagtctgtaagcagccactgagttcttaccccttaggtgcttttccacagggagtcttggctgcttctgagcggcctcagagtctaacaccataggattgagaaacatggctctgattccttctggatcttgattctttctgcagcttccaagtgagaaatgtcatttattttggggaaaggacaaacaccagatcctgaataatcagctttttcaagatgtatgcctttagactcccattcccatatgagagtgctgatttattcaagctgcacttgaagaaaatcttcttaattaagggttggatgaggtctctttatggtctcatgacccaacactacagatctgtctaatcctataatatatccaaaattttcctcattaccgtattcctaatggtttcagaaggtcacccatacagagtgtgtgatacagcaatatcaagagcagctgacttggatgccatcactgttaggagaagattcttagacactcaaaagacccaaagattctggttgttcctctcttcttaataaaattaaaatgcgtagcttcttaggacatagggagtagttgatgagaaaggtttccgtccatctgttgtcagatcgaagacactctactgaccctgttgaattccatttaacagtattttgaagccaggtcctggggacacaaagattcagacagagctcctgccctgtccagcagaggagaccactatactaacaaatatctgtcttataaggtaacagggattaggatgtttgagggtataaatgctatgaatacattgaaatggagtaattgaatttacctgcaagattagacaaaactacaaagttatatttcatgagggtcttcaatgggcagtagagttttttaggggatctgagaggaaatggcatcccaaacaggatcaatcatgtgtgcaaagcttggaaggctgaacgtgtatgttgtgttggacgaagagtgaggacgctaatatggtcacagggcagagttcctggggtgaaatcactcaatatatggctagaaaggtaggctgcatctcagtttcaggtggaaccagataggcttccaataggcttatttttttctggttgtcctgctagaatgctactttctttcacaaggaagtgcacattagattgttttgacaatggacaaatactcaaaagattatcagtggaaaagaacatgacaaacacctaagtcaataaatcttgggtagaaaggagatatattggaaggaaagaatacatccaatcccaactggttctatgcttcttgcatggttaagacacaaaggggaaagattgccaaagacttttctaccaatacgtcaattttcaaaatctctccaatgtatgtcttacatttgaatttgtaataatgattcttcttccatagtatagtaaggtgcatctctttgtgtcttagcaaatagagggtgtggtactgggttttgtgctgtcatggtgatgatcatggcagagagggtgaggatgctgccgaggatgaatgacagctgcaagaagcagtccccagccctcaggtcctcagcagcctcctacctgagagtcctcatacaaatgagaagacttcctgtttctgatatctccaggctaatttaggctttgaggtgtcaccacttggagtgtatgttaagacatgttcctgttgaatgtcgcctgcagtaaataattgtctaacattggtatgaaatctaattggcttccgctagagcttggctcagcagaggaattcactcctggagtttttggagcaccacactttcttcatttcatgttatttgagaaagaatttattgatgcaaaatcagggcagtttaatttggtggcatgttttctttatgtctcaattatatattcatgtctttgtggtaaactcagctggtggggggattaagaattcaaaatagaggattttcacttggcaagtagtgctttctactgtgattaattgggagtctgcacaatgaacccggtgttggctccgttggggatttaatagcttagtagaaagaagtaaatttcaggatttaagagttttgggttacagtctgaattttgataattacctggaaaaatgatctccttgttttagttattccagattagatattcccaattagataccttttatagaagtgtttttgtgtcccataattcgatttggagaagggtgtcaagtaggtgcagggaagcagaagagcacccctcattgttgtgatcatccaacagccctaaagacttccaggtgcttacatccatttgtctttttctgtcttctttctatggatgcaatcctctagatggggaatgcacacatgtcctgccgctgatgtgggtccctgttcccagaaaccggtctgggtcgcatcccgtttctccagcctcagccgcctccgcggagctctattgctcctggctttctggccttctgacctggtgctcttcctcagctctcttgccaccatctcctgtgttctcacagttttgtttgggcatgttttatggtgttcttatcgtcctaaaacctggatttcacagaggggacctgtgtgctaacactgttcctcattctgagggctaggctggccaagccatttcttcctactctgagaaagaaagatgagaaattttgattattttccctttcacacataaaccatcatgtgtcaagtcctgaaattgaggttggaatggatacaaagatggatgagatgggtccctacaatggggatgtgcaaaggagtggggtgcaggtagggtgtgtaagggcagcagctctcacagccactggagagtccctgggctgagagcgatggctgcaagcttgggagccaggctttgctgttgcagaaggccaagaaaataataaagtcttttgaaattgagtaatgtggcgtttcagctcccgactgttagaatgaaaatagcgattctgccacacccactttgcacccctcacccctcatttctgcacttgtagcctgagtgatcttttcaaaccaaatctggaggttcctcaaagacttctctttagcccaagagagccaattccttatgaaggagttgatagtcctggaggccaggctccaggggacctctgctcctggttcatgccatgtcctgcctcactattttcattctagtgtattttttcttgttatttctggtcataggccctttgaacgttcccttccctcttcctggaattctcttttgcttttcacccagtcggtcctatttatccttcagactttgactcaaatgccatttccatagagaactttcccagacctgctaaccactgccactcccacctctgccaggagctagagccttgcccttcttcctgctttttgccacagttaaaatgtggcatttgtctgtgtgattggttgattatgtcattttttctgaggtcagggggcccgtatgcttgtgcattctatccccagtgcctggaatttaatagagctcagggactatttgttggataatctatctgtaaagtttcttttttattgtattataattattaaacaaaatgattcatttttttttcattactagttgtagtaggctgaataatgtccaaacaaagatcagattctaatccctggaacccaaaaatatactttgcatggtagagtctttacagatgagattagtttaaagatttgagatagggaaattgtcctgggccctaaatgcaatcacataaatctttacaaaagggaggcagaggaagatttgataggaacacacacagaggagaaggcagtgtaaagacgggagcagagggatatgaagatgctgaccctcagggttacagtgatgtggccacaagccaaagaatgcccatagccagcggaagctgggagcaccaaagaccagatatcttttgagagcctctggaggaatcacagccttcctgataccctgatttcagcctagtgagagtcatttttggacgtctcacctccagaatcatcaaagaatcaatttctcttgtttgttaagccactaaatatatggaaatgtgttatagaaaaaggaaacaaatacactgaccttcaatgttttgaatccttaatggatggaaataggaaaaacaaaaattgatatttgaaatctgccccaaatttagtctttgtcactgtgagagatgaagtaacactcatctttttcattatttctttttaaaaaaaatctctttggagatgcacccttgtcatgtaaatgcaatgaggcatcagctttttgtccttggggtatctacaggagcagatggagtcatccacatttcaaaactaagatgatactttttgatgttgaaaatttctgtcccaggggccctagggtatggaagcagggagggaaagacacctctgccaaatatggttttaatgagaggaaaccattgatgtcgcctagcattaagctgtgagatttggtttgtgaatgtgggaccagagttgaagattaaaatcgctaaacattctcttgttaactgggagagggacctcgtatttgtgttttttctccactatgtgtctcataggcatctcaaactgaaaatgtaaaacatagatctcttgaattctagccttctttcctgaccatcctctgactccaaccctaaacctgctcctcctggagtcttgccatctggtaaatggcaattgcattcttctagtggctcatgtgaaagctgcagtccgtcttcactgttttccttttcccgtcctcttcctcaatcctgagcacgtcctgctagattttctgaattcggaggtttatccagtcctgcctcttctgccctctcccaagctgctgttacctttgtctggagtgttccacagctttctacctaactggcctgctttttttgttcttattccctatcgtctgttctccatgctcagcgaaagcatttctgtgcaggcttcgttgttcctgatttagtcgcttcctggctcacctaaggtctttaacatccctactgtggcctaaaaggtcttccttggtccggccaccagtgtctccctggcttcacctccacacacactcccttttccttaccctgtctccactacttcctgatatgcctgtgatacaccaaggtggcctcctggcttccaggccttaaagctccctctgctggtgcccatgccaggtgtccttggggctctcttcttagatctctgttcaaggtcaccttaaggcagaggccttcttcaccacctgcataaaatagagcttccaaccccacatcatcacaccctagcacctttcttgccttgtttgttctttataaagtaactcacctattggcataatggatatttccgtgttggagagtggtagcctgtttcaacccctctagaacatgtgtgccatgatggtggggcttgatctggcatgttcattgttgtttcccaagtgcctagaacagggtctggtgcatagtaggcactctgtaagcatttgtcaaataaatgaatgaatgaaaacaaaggcctaccgttaagtggacttgatcatattttctcagtgtttgctctctctttggtcaggcgtgagagcatgaacttctctgttacttctatcaaaatgttttggtccctctagtctcagaccaggtgacattcagctgagttttgcagtgtgcattttcttagcaaggtaaagaattgaaccagattgaaggaacaaatcacacagcaggaaggactctgagagaccaaagatgagtcactccaggtcactgcctggaaagaaaacaggaatgatagaggcgcaccacagcctggatagcaggagagggccagatctctgccacccccagggtgtgggtttcactgtggaggggatggggaattataggaagggttgaacagggaaattaaattagttgtatttcagaaagatctctggcatcagaatgaagggtggattggaggggagttttgcagcagggagactgagagagaatgaaaacaaggctgagattgtattatcctgtgttcctgaccaggagacccccctctctccttgaggggctggacaaacagggctttagagcagccgatccatggccagagggcacatatacaggaagagtggaaggggtcccgtggccacatggttccagttttcctggatgatcctattcctaagagacgcgtttattctccatgtgtggttgctaagggagtaagtcaatggaatttaaagttgacacctttgtaaaagtttcaagtttatatatttacaaataagggaaaaaatgtgccagactttgtttctgtttggaattctgggaatatcgcctttggattatggacctgaaatcatgtcaccaacaggagatgcagtttgtgtgaacaaagggtaaagcttgaaataagataggataagacaggataaagaaccaggagagctttttaaataggagaagctatttgaaagcagaaaggagaacaggttcagaggataccaaaaccggagttatcacagaatgtttgtctgaccactcattcctgctgcctgccttggaatctctggaggaacttcccagaaaaaaaagaagagtggagaccactccacagacccaccgaacctgaagagcctaggtgcaggcgtgggtgtgggggtagaactgggaatcacaggctggagcccagcgagctaaggcccgaggcagctgaaggtcaaattgggaacatttcttacatcaaatcctaaatgaggttcatgctgattagtaggaactgtgtcaaataggtgagcaggcctgttctgggtttctaattacggtgtggctttcatctccctgagcttgttgctgcactgttgttcaaatgaaaaatgggaaacagacatgaaaaagagctgctcccctaagtgggtcagtgcaggcttcttccaccttctcccaccttgtttttctaaagagttacctggctttgttccctcactgatactcactgaggcatggcagccattcctttgccctctttggacagggcagcatgctgcccatttgggactggcagtagaatagtcaagaaattctttttacctttttctggcattcatatggcaaatgaatttttcgtgcaaaaaagcttcctgtgattgagtcggtctggtagcacaggtgacagctaatgcaccaggaagtgccctcaagggtcagccttggccacagcactgcatgaagctcacggtctggtggggaaggggagctgaagcaggcccttcacccctctcctaccaacacatgaaatgcctgcctcatctttcagcccaggacctggttgaagaaagatgcatatatagcaatcatcttttcttccttccttcacccatcaaatattccatgaacatctactatgagccaggcatcacgctacactcacggtagagcacgaatgccctagttacccccaaagaaataatatgtgggcgggtgactggagaagtcagtaactccttttaacatagggagagagctgggctgaataccaggggctatgccagcagccaggggaggcccctgaagaagcccagggactttggacatgaagttttgcccagctgagagctgaggaggattagctgggtagcatcaggaaggtgaaaccttctggacaaaaaatgacaagtgcaggatggggcaccgctgagggcagggtccctgtagagaaggaaaaagcatcccccgcaggcagtgagagaaggaggagggtgagaggagagacccgagaggggagccacggcagatggcccagggcctggaaagccctgccggtgacttcgggatatttcttaagggcagaaggagccaagttaggggagagcagacccaattcaggagaattcctcacttggtttcagttttgacaagagggtatctgggagcaatgcagagaccaaaggacctccatggttcacagctttgtgggatccccccttccttcttgcctggccagggctcctcagcggaggtgaggaggagttgagctcctggtttcatactatttgtgctcctccagtgaggcttcatttgtccatggattctcccccactggagtgagtgcagcaccctgtttagaagatcggcagaatcagcagatggacacccttcttcctttccatagacagttctcttctttgctattttccacctagctcttggaggctgtttctcatttggtctttcgagcagctttttttttttttttttttttttttccccacaaaatgttctttttgtcatcttctgcctgtcaccgtttttcatcctttttttcctgttctttttcatggtgtcctatttcactctcttaggcacgctctatctgatactcccgttctctcacgcatcgccaaccccgtttttcatgttgaccttcgattccgggcactgtgcacccgggctcatgcgtcctccaatttcacatttcccacagtcttcctccccccaactttctttgcttcctctcctcttcccctggcgcccccttgccagttgccatccctctgtttcacccagtgtccgctttcttccccgtgcgcagccctgtgcacccagactgcgattccctcctcccgcagctgcgccatccccggacccttcctgctgggctgcttctccacggaaggtccccatgggtttcgcctccaacactcagagcccacatggccgttgtagagaggataagataatcagatgcacctttttaattatttatttttcatttcacttaataagcacatcttgaaattgagctgcagtttcactcgtaatagatcatttcccttagggaacccacatccaaccccggttgaaattctctccgtgcgcagtgcagggaaggaagacactaggtttcaggtgtctttcttgagatccaaacatgttacgtcctaatgtaaagtgcgtgggtctgggagtgtgtgtttgtgagaggagtgtgtaagtgtgcatactttgtcccttctgtaatgtgcttgggtatagtagggtatttgtgttttggggggagtgtgtatgtgggggaagatgtgtatgtgtttgtgtgtttatggggagtgtgtatgtgagtgtgtttatgtttgtgtagggagtgtgtatgtaagtgcttgtgtatgtgtgaagagcgtgtatgtgggtggagtgttgatgtgattgtgtgtgtgtttgtggggcatgtgggggggactgcgtgagtgtgtgtatgtgtttgtgggtcatgtgtgtatttgtgggacatgtgttaatgtatgtttttgtgtagagcatgtgtgtgagtgcttgtgtatgtttgtgtgggaagtgtggatggggggagtgtggatgtgtgagtgtgtgtgtttgtggggggagtgtggatgtgagtgcttctgtgcgtgaggagtgtggatgtgatcgtgtgtgtgtgtgtgtttgtggggcatgtgtgggggacatgtgtgagtgtgtgtatgtgtgtggggcatgtgtgtgtttgtggggcttgtgtgagtgtgtgtgtgtttgtgtagggaatgtgtatgtgatcttgtgtgtgtgtgtttgtggagcatgtgtgagtgtgtgtatgtgtttgtgtgggacatgtgtgtgtttgtgggacctgtgtgtgtgtgtgtgtttgtatagggagtgtgtatgtgatcttgtgtgtgtgtttgtggagcatgtgtgagtgcttggtgggggaggaggtttctatctgtctatgagtgataggcgtgatggacatgtaacacttagcccaagtgaatgtgaagaccacagagggaaaagggaagagcagctactcaaaggggctgatgatttacctaactctcccctggtccaccccaagagaaggatcggttgtgaaagttccaattactagaagtgtgatggccactccaccagccacctggagcccagtggaaggagcgtctgcagagaggccctgcctgccatttgttctggcccagccacgggcaagcatctcaggaaaaagggatttcctggaacagtgcagcagcaacaggactgaattgtgggttgagtcccgaggatctcctctggctcctctaggcccagaggcctcttctgctccaggctggggtcctttcctagggcacaatgactcgggtgcccctagctagtctagtcatggaagattgtaaatatagcttctcatgtcgtcgaacttttagaggcaactgtaggaaaacagtagcaggcaggtttcatcatgcaatgataatgctatttttatgtatagcttattgaaacctgattatgtggcagccaagaactagatgaagctcattatgcacactgtgtcatttaatgttcaaacagccctgtgcgatagatgctgtcatttcccttcctttagaaatgaggagaccaactaacccaaggaaggttgcacattggtaagtggcagagccagagtttgaattcagaaagtctgactcttcacagcctccctcaaacactaagcttccccttatgagcaaaggatcaggttaacctgactcaaaggactgtatcccaattgccagcacaggcatgggctcaagttgttgtagagacagaagcctccttggaggccacctagccagtgattctcagctctgctgcgcattgagatacttggggtattgttaggcaataccaacgttgaggtcctcctcagaaattctgactcagtttactgggggtaagcccatggtgtctttgtttttttttttatttttactcctggatgtttctgttgtttacccatgttgagaaccactgtcctaatttacagatgggaaaacatgaaactgaagaggttagctggcttatccaaggtcatgccgctggttaagcacagtagcaaggactaacccagatctcccatctctcttccagggcgctttctcttgccccttgatgaaagacaaatctttccttatgtgtgtgagggaacaaaatacaatatggtgggtaagagtttggactgagacaccaaatgggttggaaaaatcgctgtgtaatcttgggttttatgtgttctctggctttgtttgttgttgttgttgttgttgttttccatctgtaaaatgaggaaataataaatcctgtctggcgggattcttgttaggtgataacatgagatgataccattaaaaagtgccataatctagctcagcatatggtcattgtttttgctgtgtggaaaggaccatccattagacatcagcctcactgggcattctcatgagctcagatggcaatagtcagtaacatcaactttgcgttttcaaaagtagcacacaattaaagaatacatttctttatttgactatgaactcattaaggatgatgtgtgctatgtaaatgcactctgcacaagttgacgtcacctgtggaacctcggtgacgatggctgatggaatgtctggccattggtttggctgaggtagaaccagcatctaaatctactgttgccatgttgtccttctaacttgttgtcacaaatggggacacttgctgttcttccacaagttcttctcaatctcatcactaagacagatgtgaagacattcataatgctgatcacgggtacatctctgaccctgtgaactcccgaggcctgttttccatgggatgatttacatcaggagacacgattgtctccatcactggtttcaataccatccaacaaagatgccatggagattggagcttactccctaaggacattgtctctcagctcatgcaaacgctactcttcctgagtttccccttgcctccctggactctgtctagacggctgttttattctcagctccccctcccctgttggcctacacatagtcttctgttcttctcacttaggctacatgctgtccagtgacccacccaggcctggggctttacctgcagtgctttcacccatgatagtgatatctttatatccaacaccggcaaagctatgtttgtgggaacctaatggaatctcctctcaaaagtggcacaatgtattcaaaattaaacaaatcatcttgccccacctcccttaccaccccaaattcctcttgcttctgtatcagcagtcttggagtggtaaaacccaattctcaagatagatagaggactagagatcgtccttgatttatttctttctgtagcactcctcattcagtcatctgttcctatagatgcccgtcactcacgattccccatctttgctgtcatggccttgcttcagccatttatcccatttacctaacttattgccttcctacagcctgtgtcctccactgtgcatcctgtgtcacatggtcacagtaaaataagagcaaacatttattgggtcctttccatgtgacaggtactaggcttaacttacagaatctcatttaaatctcccaacaatcttaggtagtagatatgagtgtgatatgaacaattttaggtgaggaaactgaggctcagggggggtttagtcttgctgaagatcatccaaataaaagatggggcttgaacccttatctactattggaagaagcccgactgtggggctgttccatccctaagaggctgagctctctctgctttctcaaaagcatccctctgctaagtgctgcttcttgcagaggtcttcttcttttatttctttttgggctctcctgtttccttggaaatgttgatttcattgcattttcctaatatttcatgctttaatttaatttatttgatactactgtacagtgccttgagcacctcagaggaagtgagagttttataaataaaataattattacagcttgctctgatggcagcccctgagctatttagtagatatatcaattactctcagtgttgaaaattttcacctaaagctctttatggcccaagttttccttggcttttaatgctctatcctgcttgttgtagttttgacacaatcatgtagcacttttctttactatccccatcagaagtgaacagacagcagctcagcaaaagtgccatataatgtattctagagaacatgacctagttttcttaacctttttgaatcacttagttccaggtgtcatttactagacctataatgtcagttttgcaatgagtcaacccgccttgcccacctcatggtctctattagtgagacctcattatctattagtctgttgcagaaacctcacccacgataatctagagatgggtatgaattaaccacaacactgtttggcacccaggatttcaggattctaaactacaaggcttatgcagacaaaatgtttgtcaaaatcttgaaaggaagtgaagccccaacacatggaggagggtgagtggattagagagtgcagtgtagagaactctctaatgaaattcagttttcctgcagctcagaatgctatgcaatccacatagtaattagagagaactgaggtaattttgcattcctggacccagtattctcaagatgcattaatcagtcagtggcaatttgcattcctactaagtgcaagccactgttcaatatgctgcttttgctaaattagcacattcctccacagttcctcctttcacgatgagtgagtctggcacatgtcataagattccacctctcaggaatacacctgaatgtggcactgaccatcattcctagcattatggctactttctggatcctgcctgcctcacaatctcatagcacttcactagcaagagatgtgagaggaccgttgtcatctgtttagtgttttagaggcatgttgaagaattcagaggataaaccaatggtcaagctaagatttctccctggacatctcccactcatgcagttagacctgactttcctcctctcacttccatcatggcatatttttttattctacttaaaaaagatacactttattctatcctattttactctgttctatcttattcattcattcaataaaaatgagcttagcgcttgctgtatgccagttatatgactggcatgtacaatgatgagcaaaattgacattgttctttattttttggagtttgagttcttctcttccttttgtttttaaacattttttatttgttttgtagagatgggatcttgttaggttgcccaggctggtcttcaactcctcaagtgattctcctgtctcagcttcctgaggtgctgggattacaggtgtgagccaccatgccaagtcttctcttcctctcatcttgacttgcctccctctcaaaattctactctttgtaatctgtagttgtattaaggatttctaaagaagtttcctcattaaccagaaacaatacactgtgctgtctccattttgtgttttttagcaaacaaatgggagtagccaatctgtccattataaatgagttcattcccattcaagcaatggctgtcatgtatcttgcctgaggcttcttatgttatgagcaacatattggcttcagttgtctgtactttttcctagctgcacagagatccttagatgaagggaaggcacaataactcaaaataatgtattgtattatacatagtagtcattcatagttccaatgacaggaaacacaatgagcttgttcaaggtggatatgtgtaaccctctcaccaggccaggtagaggttgttagatgtctaacaactattcttccccctagccaaatacgaatctgaaacaaactatgacccagatatccagaccagaaagaaacagataggatgaagcctgttttgcccacaacgggaagaatcacttccgatgaaaaacgactaactggaaatacttcaaattgctgtagagagtgcagtgtggagaactatctaatgaaattccgttttcctgcagctcaaaaatgttttgcgatccacataggaatcagaggacccaggtaattttgcattcctggacccagtattcacaagatacattaatcagttggtggcaattggcattcctactaagtgcaagccactgttcaagatactgcttgtactaaatatgtctattgcactgcacttcatctgatgatgggtgaggcccaagcaactcatcagatactacctctcagaaatacatctaaagagggcaaatcctaggcccattcttttcctctcatttctccaaatagcttgtgagcccagttgaccttgcctggatcaggacaatcctgggttgctggttaaaggttgacttggtccatttgcctctactctatgaggtatctcatatcactttcattgtaattctgtggtagccctttaataaaaatggccagcaagcccacaagataacagaataggaatcaatgagacctgcaattgtctgcatgccagattctcctgtcagcctggcctccaatccatcctgccaactcaacctcctctgggactgagacgtttgaaaacagtgcagcagcctcatctcctgggcagtgtttttctccatcatttgctttattaaatattgattttctgttgcattattaaaccttaagtccagagcataaattctgggctgatactttaatctgactcttctcatttttttggcttttagaactgattttcaggccagctctcctggggaatctttaagtcaacttagggccagagacaaacctgcctgtaggaaagggaggagcccggagttgagaaggagcttgccttgccagtgcactataaataaggctgtggctctgtcaagcagatcttcactttacacatgtcttagacacagaggcttatgctccctgggattcaggttgtagtgcaaggaaggacttttagattcccaccaccaaaactatcgagtaggcaaatggtatgcagaactgattttagagctctctagatattatcaaactcattatccatccaccccctccttcttttggtttctaatattcctaggatttgagtcaaaggttataatcacacaggcatttggatttccactcactttgggcctctggttcattcttgttttctcttactgtctcttctctctaagggccaatggttgagtaatcagctgtagccatccattataggatggagccatcacacactttatgaaagtctttctgagagaggcaggcattctcaaccagtcatattagccagagtgatatctaggtttaatttttttacttttttttttttttttttttttttttttttttggagatggagtctcactctgtcacccaggctggagtgcagtggcgggatctcagctcactgcaacttctgcctcctgggttcaatcaattctcctgcctcagcctcctgtgtagctgggactacaggtgcccacctccacgcctggctaagtttttgtgtttttagtagagatggagtttcactgtgttagccaggatggtcttgatccctgagctcatgatctgccctccttggcctcccaaagtgctgggattacaggcgtgaaccactgtgccgggccaattttttacttcttgaatacttcttagactggcagtatcattgactgaggctagggttggtgattttaaagataagaagcagaatactgacagacaagcatgagaaaagaaatgcaagtcaacatgtatggagcttctctggcaggactggggtatgttgctgtctacatggatgtttgcagagagctgtgcctatctccctgtctgacttctgttcatcccatctttctattcagttcaccccatctttctcctcagttatcccacctttgtcttttaggtcctgcatctccagaaatctagtgttaggaagttattccaggacctagcagagcctctgtttaggaaaagagtgaatttgattcgctcttcactctgggatggagagggaacacaggtagctcatggggctacagaaaccagcaactacaaaccttcagatgctgtgagccaagtgctgactgagccgggatagccacatcaggtgctgttgaaaatgattcttggggaatatttgatagaaacaatgtgaagatcagggtggaagaaactgtgtccttcattttcaccaatactcttcatgtcaccaataaccataggcctctaaagaataatacatgttctctttaaggtcatggggattccagatcatagatcttcctccaattccatttccaaagcctgaattccctctacaataggtatacagctagggagtatctaccatttatttgaacactgtcagtgatgagcaactaactacctattcatctaggtcttacttcctttagaaaagctctattagatccacatatacacctctctccctctaatatctacctcttggttacttctttataaccacataggataagctgaatcttttgtaatgataaaaaaagtccttggcatttaattaagagctatgaattttgaatcttactgtctatgtaaatgtctacaagttataggtcaaaatggctgaatattggcagttgcatatgtttcaatctaatatttaatttctcagagctccagctttctcatttataaagaacttgaatataaccactcatcagtttattgtgagggggaattgaaattaggtgggatacctagcattggaaagcattcaatttaaaaaaaataaataaatttaacaactatttactaaacgcttattctgtgtcaggcaccgtggcaagtgttgggaataggaaaatgagtgataaatggtccttgacctcatgatggggattgcggtatttgaggatgcctattgtagtccttaagtcttcccttcttctgctaactaaatagagcaagtatcacctgcatttgtctttgtactcagctcattaaattgtagttatctcttcacccaaaagttatacattttggggtgcaagaatcgttcactaaatgtcacatgtttttctccataaattctggttgttggacctgtttgtagttcttcatctttccttgtctgaaagattctggtgtcttcacttatctcttcagatgttagctgacttttccccagggcagcacaagctcaccgaggtcaaacaagcatgagcatgctgacttccattcagtcacctctgcacgtcctgccgctgatcctttatctcctgtcttaatctgcccaagctgctatgacaaagtaccatagactgggttgcttattaagaacagaaatttatttcttacaattcaggaagctaacaagtccgagatcaaggttctggcagatttggtgtctggcgtgggctcacttcctggctcattgatgacgacacctttttgttgtgttctcacatggtgagagtggtgaggggtctctttctagccttttttataacgacactaatccgattcatcaaagctttgccctcataacttaatcacctcgcaaggctccaccctcaaaaaccatcatcttagagtttaggatgtcgatatatgacttttggagagacattaacattcattccattgctttgtcctttcacacacttggaatgcctctattttctctttgattcttcactatttctgcatattcaatttttgtaatgattaaaaactcatctgaattgcaggaattcattggaatagttcaagaagatttattggatagatagatcagaatttatggaaacaaatgcaggaaaaacagatgagccctgtctgcaggggatacctctgactgctactctctgcccctctcttgttgggactgtgtagtctccttattcatgcttctttctgcaaatctcctatggtggtctcttcaatctcttacttggggtttctctaatccccactaacttcatttcccatgtggccttggcctatattggtgctcattcagacagcttgatagaccacagtcaactgactccacattggtgccttaaattccacatagcagaacaacaagtcagactgccttcatttgagttaagtgaccaaaatgagttaagtgagttaagtttggaccactcttggtccaaacagctattgttgagatgaacatagagatcatatgatacatgatgcgatttatgtctattcagtgttctgctaattcagaaacttggtaaaaatacattattaccaattgacagatctcatacagagatgtttgataatgtccacatagtcaaaaccaacgatggtctgcttgaaccttctctgcctcctgtctagttcttctcatctacctcactcattttctggacatatccattgccaaggagatgtctctgcccaagaaatggtctgaaaatgtgttcagaacctacaagccttctctttaaaggacaggatgtgggggaaatgcattcagtggctggaaatcaccctcacttgaaatgctttggcctgtgaaagaaggagactattacaatctactgaaatgtcaataattaaaagccaaaaaagttattggaaaggctcgccatgattcatgccaactcccattctccccagcatgtagcctcacaagatatataattttccatttgtgtatagtggagagttccaggtcacataggaatattgaaaatgggtgtaggacccagggtcttcaggctatttctgtctcaagttattttgattttcccttttgatgctgtcagaaactctggacatgatcatttgtgctggaaaaagcacaacttctgccctttgtttcgatcgcttttgccatgtgtgattggtgaatttgattgctggccacagaaaattgcatttgtgtcgggagcattctgaacagatcaatgtaggaggaaaccaggcaggatcaattgtaataccaaaggaccagtataaaaagtcatgcaactcacatgtcatcctatagctctcaatgtctaaacatcacatggatttttggccacaattcattaattaaacctcacaatatgcagtgaggtcaagtaatgtttgatgctagacatctagaagagtgggaaataacaccatgtcaatccaactgtctttatgcagagaatctgcaaaaagtgagacaacatgtaataatacaaataattattatagtcactccatatattttccaggggctggctatgtcctctatacacatttctaattttaacttcaagagaagttaaatctatcatttctattttatgactaataaatcaaacccagaagggttaaataatctgtgattgtccatgagtgtgcagcgaagtggggtctccggaattctgttctgactggctctgaacgtcatgcttttaaccgtctctatttattgtctttgtgtttttaaaccacagtgctatataccattaggaataagcattatcattgctgccactattcttgttagtttactaatactgccagatgtgtagtaaactaagtatttcctcttctccacaaagggatgctagggttctagggaggcagttattcatgtgattacatctgtaatatttgtatgcatccagcttgatcaagcagtttccctgtctattatgaaaaccagcttgtggaggaagtagggcaagtatcattcattccatgttccaagtgaagagagtgaggctcacagattgtgacttgtgcccaggaatggagagtggagctaggacgagaagtcaggcctcccagctgcagagatactgttgcttccactctcttgttcttctgtaacaggtagcagttgtttttgaagatatcacagcctaaatggaattaactttcttcttaaaagttggactgtctccagcctcccactttcttaaaaatgtgaaaaacaaacaaaaaccagttcagaacactttagccaaagagtgtgtcctaaatgagtgtgtcctactctctttaggcttggaccatgtcttatacacctgtttggtcctatctggtccctgataggctgccttcaacggagggaagcagtggaaaaagagcttaactgactgctagaagacaaaatttatgtcttaatgatacttaatgatttagtttcaacactgtttattagcaaaaaatgtttagtgatggcatcctacattctaggccctcactgggcactgagtagctgggcaaacttatacaggacacttaagttttctgggcctcaattctgtcatctgcaaaatagacttatgaatgcctttttccctactgcaaagagttattgtaagaataaaattaaatcatggaagtgaactgcttctataaactaatgacccctgtacttatgtgatgcattattttaggctctaaaaaaatcgtaaatgtatcagcaagttaagaatgtaccttgctacatgccccagggtaacagaatcgatgctagtgcagtgacttcatggactcagtatgctgggtgaggagcggactatgatgggcattgctgtgtcgcctctttctccctcttatggagggggctgccttcagcagggtggagctgctgctctttgtgcagccattctcttggaactgctttctctgagtggtgtgatttttgtagcattttcttcctttcctttctctttctggcaatggctctttgaaatattatttttgcttcctcgacggctgggctgtataattgatggcctctcggggttgctggagtcgtgcatttaaaccacgatcgccttggattcaacgcctcagagttcattactttttgaaatgcttcacgtctgtttgtgttcagattattgttgctctggagagagaggttattgtcaggcaggaagaggagtgtggagcagaattcatcataatcacatgctcttctcttctggacgaatatttctgggtaacaagacttcatatttatctggcatggctgttctgaaccagggaacccaggaccttcactttccccctgcagcctgctggagggagtttagcagcattcggtcttggaatgtgggaggctgctgctttgcaaataaagtgggtaataaaagtgcccagcgctcatactagagaatgatttagtgcagaatgtgtacatgtaggatttttaattaaaggtttggggtgcacttggttctcagcaatggtgttggtggagggagcatgctctctccacttgagctatgatcttctctcagttctgcagtggtcgtcccatccttcccagctcttgtctctctgtcacctcatggtccacccacaccattatcactcatgtatgtccacaccctggctcctgctctccacgctgcaccagctccataagcattagcaccccaaatttggtaaacccaaacaagtttgtgtaaatttggaatatactagaacctagtctatatggcaaatgaagaataactcctctaggtttccagaaatggagattcagagttgttggggaggctataactgagaacttttaattcagattctgccattctgtgcatttttattctcagactaaaaaaatcctacccaccccccttttttttttcagacagagtctcgctcagtcgcccaggctggagtgcagtggtgcagtctcggctcactgcaagctccacctcctgggttcacttcattctcctgcctcagcctcccgagtagctgggactacaggtgcccgccaccatgcctgggtattaaatcccacctcattctttaagactgaaattatccaacttcttgagcagccacccttagaagttccctacccccacctcattctatctcaggaaaattctcgggttccccattgaacttccagagctccttatttgtatcatggctgcaacattctttacattttttttgtaattctccatcttatgtctgttctcttttctctcactgtatctcttgaagacaggagctagattttttgtttgtttgttttatttctgaatgaccaccatctagtgtggttccaatatatgcttgacactaaagaaaggttcattgaattaatccatgaaagaattctgtttgatcaagtcacatttcgattttcctgttagttaagtgtaactgtatgtggaagagaagcagtgttgtgtgcgagggacacgctgattcatctgtcctttggaaatacacacagctcctcattccagagggacaggtagtcagatacagtttgttgggtggggctacttatacaagaccaggtggtaaaaagtaggcatttctaaaagatgggtttggtcaagtttggtcaattatggatatagaagcaactttccaggaaaaaaaaaaagaaaaaaaaaacctgtttgagaaaggtttttcatctcaatagcagatgaagtacttataagttgaaggcagtttcttttctttttgcaacatagcaattagaagatattgtcacatcttgtcatttgaaaattctaaattaggttatgcatgtaacaaaaatatatgctggtgtttaacaaaaaataaatatttgagggactattttctgtacatttctcaataggacaccaagtatagatatcctctcagattatgcttgacatgtgttattatattcatatatttcttagtattctgggggtgaggaaggattttagcctctgtgaatcctagttgagtatacatgcctaaagttttttttttttttttttttttttagacagagtctcactcttgtcacccagtctggagtgcagtggcacaatctcggctcactgcaacctctgcctcctcagttcaagtgattatcttgcctcagcctcccaagtagccgggattacaggggcccaccaccacatctggctaatttttgtatttttaatagagatggggtttcaccatgttggccaggctggtctcgaactcctaacctcaggtgatccacctgccttggcctcccaaagtgccaaagtgctggggttacaggtgtgagccgtgccgcctgacatgcctaaagtttttattgttactttgttactcaaacttctccttgacacattacaggagaatgctggattgcatggattataacagtctaaagctcagcaaagtgaaggtgattatcagcattttaaatgctgtgacattttgctgccaaaaagtaattgatttattaaagacattacaatacatgcatgattcaacataagaagttcctttgaatttgttcagtaccaaatcctgtgggagactatttgctttcagcaccacggacagaaactctttttcattcagattcagttggccttacacaagtaaatattatagctcagcagtggcactccaatccactggccacagtatgatccaatagctttaacattccaactgatgggtactggaatgttaatacattgttttccacttattttgccacaaagtggaataggggacacaagtggatgactttataatgcattattattaccttcactttgctaaaaatgaaggtactaatccataacaaatcagatgaaatacataacattttagaagatgactgattttttcctaacaagcaacttcttggcaatgctagatttcaaaacactaaataagaagccataactgagttcagtgattccacacctgatcactgaaccaaagagactaatgaaatgcctaaagctaataaaaaatcttgttgttgaaggcaatgaagccccaatggggcatggggtaaaatactgaaggatcaggatcttcatctgtcgtatgactatgactaatgcactcatcctgactgggtaaacctctagttaattcccaattgcttcaggcaatggatcaaaacttttaaaatacagggacacagtcttaatccagagtactgtttgcttccttattcactgttgattataaatgttccaacgcaattttatttctcctcactcacatgacaaaagaaatggaaaattttgatggagtaattcaggagttttgctgaatcgctcacatgaaattggattataaaatatatagccacattgatgcccaaattaaaaatatttatagaacacaagctgatagacgtcttagataacgtgaagtccaacctgtctccttacagatagggaggctggctccgcaggatctcatctcttgccttaggtcacagagataaacacatggttgggaggggcttattgcttgatgaaacaacaaagaagagaaggaaagataaactttaataatatgtaagttattttgtttccatttttattcagaaaagctacaaggcttcctttttactcaacaaaatgccatataagtaaacataattcccactttgcctttctgtcaggaggcttaaaaagaaatttccagcctaacctaaaaatttatattgacatttatggtttccataagaggtattctctttttccttggattttattttatgtgtttacccttttgttttgtgttttcattataagattcctcaaatttattggggaaatggtgaaatataaataattatgaaaagtttgatagacagccttttcaaatgtaaagtaatcatatataaaatatgacctggacaattgacgccttgtgtattttttgggatcaacttggctgtgaatcatttgctcgtcttaaaaattggggatgggggaagaatgttcatcatttatctcccaagaatgcatgatgaaggtaattaaaaatgaagtgaaaaagaataagaattttattagtgtagatataggttatgtaagagaggaagtatttttattcagaacaaaaatgtttgtaaaatattaaatgaaaatgtaggttaatagaatttagcatttaacttgtcaattgtattaatgaattcaaagcaaagaaaaacttgggcgtttcagttattcagttcaaacaattacattaattaagtaagcgggatttacttttttattcctggtcttatttatttttccgttcatttattgagtacctgctatggtttcaggcactctatactgtctgggtattcagagataaaagagaattgctcttctcaaagagttttcaggaaactccaccctctgctaaaatataacacaatgaactgctgcaagatgctggggaaacaaaaaagaggatcaaaaccaaaccggatcaaggtggagtggagcttgaggaaggctcctaggaatgagtctagatttaaagggctaagataaatttgttatgtaaagattgagagtctgccaatccaaagtaccctaatggatgcacaagagaaaatcctagggagagaggggcaggacacagatcttaatctagtttacagtgaataatggttgaaagatggaagtgggtaggcaaaggctctggtgtacgtgtgtgtggagagagagacagagacagagagaaagtttgggtgcattatggtaaaagataagataggagagctataaaatggggcagtccggaagggccttgccttacacctccagttaaggagtttacatcctgtgaaatgaaagagagtacttcaaaatgttataagcagatgagatttgcatttccacaaagatccttccaagtcattttggaagacggtttgaagagggacgaagctgacccactctattatagtaattcaggggaacagtgtggatggcctaaatgtagataattagccttgatgatgcaggagataccaagtggaatgtatctttaccagcagggactcatggggcttggcgactggtatgggaagaggaaaacttgaagaagaatgaggaatttccttgactggggggtagcatagcatagcagtttagcatgtggacactgggagcagactgcctcttctaaaacctcgctgtttgatcctggtatgcttcttaacatctcagtgcctccatttcgttattagaaaatagtgtaacactaacaatagtaatgttatttttcatacattttcagaaaattattggaaaatcatcaccgtttcttaaatctctttaaaggcctatgggaaccccgtttgaaagcttttgaaatatacaaaagggattgattgtctatggagagaaagtgattcattcaatatgggacttcacattcactttgtattgtgtattcacagtctaataaattattacataatttgtgaaaagatgaaagagaaaaagaacatcttcagagaggatgaaataatccaatagagagatgttggagatgattagtgaagacattcagaaggtagagagaaactgacagtcatgttaagtctaacatgactttcaaagaagctactaaacagtgatggattattattaaaggcagagattagccaagaagtaaagcaagcaacttcaaaggaacaagcaaaatgggaaaaaaaggcacttcaatccttaaaagaaaaggacaaatgatagaaatttttatacaactgaatggcttcccataagcaagtagctctggtcttccctcaagtctagaactgcaaactcacaggttttcaagtctagaaaagtaaaaacaaaaaacaaaaccaaccaaccaaccgaacaaaaaaacaaaaaacccacaaaccctctcaagctctcagacttttctataacttgtgtcctgggcagctgggtttaaattccatcaatctaaggacctgagtttccaaacactataagtctaatatgattaccaccagagttggtggttcagctcaccacctccactccacccagccttagagaatgaagaactaaaacccggtgaggctctcccatcagattttctttccattgtattcgctactaccagccccaggccaacataggccccttcctggaagaagcttcaggaaaaaaaaatggggagaagataaaagaagaaagaagtgatcaatttagttcatcatcatgtatgtaaagtcaataaatttaggctatgtatttaacttaaggatctcagaataagttatacaagtaagacaagtgattgtgctcaggacacaagcaattgcctattgccaaatctcatggcattttttcagtactctttctgtcataattgatgcagttgctaccactgtccttactgatgatactttctttaccaacttttcatgaaactactccctcttgactttcacccaactctcaccactccatctcagtttcttttctttatccaccttaatccttctcatgagtcatacctgttggctttcctctgggttccacatttgaatcttccttttatgtttttcctaggtgatgctactccatcatggcatcagcatgaagattatgatttaggcagtcatcctgctgtgttctgcctcatttcttttctaaattcccaaaggattacaagttgtctattgagattcttagcttttatgtcctgcagacaacttgagctcagtgtattccaaactgtttttattatccttggtacctaaccaggtttttggtttcaatcaatggggattgattcaggttgacttaacagaaacaaggagttgactaaaaatatgttgtataactcatggaattgacagaggtttgattcaaaaatgggaagggggtcaatacatagaaaaattacaatgcaggaagtcctgccagggcattgcatccactacagcttaatagtggcactgatgttggcactattgaaacactggcatttgatgcctcttctgttccttctgatacctctgaatgctggacatcccaacaggagtgaattctaactgtctctgtatctttgcatttttaactatgtatgcaaattccttgaccagagcatccagtagacagagaccaggtgacattcctatgctgcacctattagagtactataaggcaagtctgaaatcttatcagatttcaaaatggagtcacactatctagtttattattattattattattattattattattattattttaatctaggaagggtgttccgattctgggtagtagcttaaaggaatggcaaaaacccactccatatttcatgaggaaaccttatcttcaaccgttatttcccatgttaactaatgccaccaacatatatcagtcaagctagaaacctccatcatttgctagtttttctttcacttctttttaacacacctgttttgttagtagtgtttatttaagttcctaaccttacaattctatctaccaaatattcctttcccttgttttctattctgctctttccactcttatagaagccctaggtcatgactggagaggactttcatatttttaaacagtgatgtactagctaaggttgcatgctccagtgtctgatcacctgcatttgtatcaaactgcagatcatgctcactcattgtgcaaccctgggcatattatttaatctctctacgtgtcatgtataaaatcaggggaataataataatacctgccacacagggtctctgcaagaacaaattgaggctgtaggtgtaaagcattgtgtatgcccacaagcaatgtgcacacaatgatggtaaggtgacactaaaactggaaagtaataatgaggggtgaggtggtgaaaacagtaatgatggcagtagtaatctggtagctatctctaatacgtactctcttgaggatgcagtctgcattgctgccagcattatctttccaagcaaatctgcttcgaatccttggatggtcctcatttcctatggaataaaatccaaagtctttaacaaagcatataaacttctctaaaatggggccccaagttatccttttaccatcaaattctaccactgaccttatagtacaggaacacagaccacctcattttccaacattttaaagattttacttacaggtttcacatatgctttctgcttcctagaacactctcctttgctgccttggaattcacattttctgtaaggcccaaacacatggtgcctttctttgcattttcctccctgataccctccctgtgttcctgtcacactctatatttgcatctcacacggtgctgtacagtcctcattgcatatattgtcaacttctacacctgctggcacacccttgaacttaatgttcctatcttacccactcccatctctgttacataagaccagcacatagtagttgctcagggaatggttattctatgactgtaataatcaacacatttgtaatgactcttcaaggacccagaaacctggagaggcatgcccaccaacttgtcccagattagttaaccataccccactggccacatttggcagtgaccaaacaggctcagcatttgagggcctggactcttgatctctgctttcatcgtttccactttgtgcttggcaccaggcaccatggagaaactttagcatgataccgggaagacacagtcggtcatttttttctgaaggaattttcatgccaccataaactctaaattagcaggcatcatagttatgagactctggagccaaatttgcaatcaccattaagacaaagaggcaaaggactgtgcatgtcccagcaaggtattctaaaacagaaatcgctactccctttgacaacacaagtgtcatctgaaaaatctccatgttctttgaaagcaccagacaagtatatcttctctaggtctacctggtcatagaaactttagactcaccaactccaaaaagtaaagtgtggaacttggtgtaaagtgcttccattcctgtttctggaacttaatattcaatacaaatttaggccatcactagatttttcaaatgacacctgtgttgttaaaggcagtagcgatttctgttttagaataccttgctgggacatgcacagtcctttggctctttgtcttaatggtgattgcaaatttggctccagagtctcataactatgatgcctgctaatctagagtttctggtggcatgaaaaaatccttcagaaaaaaggaccgaccgtgtcttcccagtatagtgttaaagcttctctatggtgcctggtgccaagcacaaactggaaacgatgaaagtggagctgaagattttgtatttcaaacattttactaccgtttttgagagcctcttttgaaagcagtgagtttacgggggtgtccgtagatcttcctgttccatatgctgtgtttacccacagaagagggaactttccctgacacttctgcctcctcaccaaggcagagaaaagaggtcctctctttgctcctttgctctgttctcccgggctgaggctggggatccagttgatccagacagttactggctgcctcccaagcaagttcctctctcagctcatcctctttgtgcttccttggcacagctgtggggggcagtgcactgccccagttcctacatctcacacccatgtgagtgctgctgtttcttttaagacttttctactgactactgtataaatggatcagattggcttaaggtggagagctgcttcttttttcttgaggcaggacacaggaaattctttcctgcagacccccacactccagtcgtccggtcctggtagttaaaggtggtgaaaccctctcattcacctgaagcctggctcttccctcaatggttcagacctggaaggaaagaccagagaaagactaggatttgggccacaaagcttcaaaactgcattttttcttttaaatgtaaatttagattatttgtaattacacaagatgaatttgatgaacaatgagctacacaaattttttgggaaaaataatattcatttctaggcagttgaccttcagtcagatccacacagcgtcatgaacgtaccatgtcattgtgaacctatgctacggcttcatggcgtcagaggtgccaattcagaaacggtgtggctgggccttctgctttcagcttacctttttttgttgttctaatttttcttgatttggattaatactgtactctgccacagcacgctggattattttgctgcgattgtttataaggagtggcatccttatgagggtatttgatctgttattatcccactttctcttgaaattgtcgtatctaggctcagtgctatagaaatagaactttaaaagtgaaaaacaaaacaaaaaatctcactgctggaagacatttcacactgaaacatctctttctgtgtcttgctttctatcactgtcactctcactccccccatatgtgtgcacatgtacatacatgtgaatgtgtatgtctgtgtgtgtacacacaagcgaatatccaaacagacatttatgcacacattttcttgagatatcaaggcttttatgttccccataatgtgtgcctcttctctcacttttctttcttaagggaggaaattttcttccatcagaatatcactctgagataagccctgcatttataatgcacacaaagactttttccagtacttgtctaatgagaagcgatgcccaaaattagagcttgatgccttccaattatcctattgcacatgattttgttataccacaaatagttattttcttccttccccaacagctacataaatgggtcgtggtaatccactccaaaacaaatggctcagtattgctaactttgctgcatataacgcaaatctctccattaataaagaaaaagagtgtctggtcatttcataataattttaatataattatttttaaaagatatgttggtttaaaagatatggaggagggttggaagttagttctcaagagcatagctttcatgaaaactgggagagagcccaggatggagtaggaagggggctgcagggctgggtggcatccattactttcactttatttttgggctcggattctttaacgttgaccctgctttgtgctcaggcaaataatgggtcaaggcacttcaaagcagacagctgctctggacttgattcatcctaatcagaaataactgccgcccttgcctattcatcgctttcccaccctagaaatgggggattacgggaagaatgaagtcaaatctaaagagttctgccttagatagttaagaggatgattgaaatcaataaatcccaggctttcgggaagcccacttgattccaagtttgctaaagacggaaagaaagaactccaacaggagcctctggtgaccagaactccaccactgagccactgcggtggctctctcatcactgggacttcccagcaggagcctaagtattactcgattccacctcattatggtactctccccatgaggagtgtaagtcacaatgacaggacaacaaaatggttgggagacacagccaccaagggaagcaggcagtggatggccagcccctatgaatacactagcttgcctctttccagcagcccaaatctccttggagggaatcccagccagtcttggatctctaacgcagccttctctttttagtttgactggtatcccagctccccgaggaacctgcaggccacttgaaattcatgatgacagcagcagataaagactccatcttatcatccacgtggccactgctttagacagcctgctttttaaatttttattttttaatgttttgttttgttttgaaatgttcgggctttcaggtcatggcattgcagccattcctcctattttttttctttaacgatatgtaaatactttcatggaggttgtcttatttggttctcagaaggacactataagacaaggcagttataataatttcagttttataaatggagcaaatgaaccctaagacatcaaaccactggccctcaaatgcaccagggataggactcttgcaggtttgcccttcttccagttctcatcccattaccgcttccgagccccctgtggggatccggatgatttcctcaaacgctaggtggcgccctgtggagtgcccccatgctcacactttcagagggggtttgtggcagccatagctctatgaatatgtccattcccttgactccgtgtctaggagaacattgtctacatctgagtgccaggatccacatctgttcaattgaatagactccactgaatacatcagagaagcagggccagactggctacccatgccctttctaatctcactgttcaattccttggggaaatatgctactttgaggatgtcttcagtgccttgcttctcttttcttcattttcactggaaaggaggttgctcagatggcgtgtgtgtgtgtgtgtgtgtgtgtgtgtgtgtgcgtgtgcgtgttttaaggattgaatgccctgaaaaaacaagatgagacctagaagtatgttcagcaacaccatatctggcttctctatactccccttcatatttttcttagctgttctgttttagttagcaccaatatagtgctccccacccacgtatccctttagggtgaaacgcctgctcagtgtgcttgggaaaggcagtatattttaggcagcctgataaaaggctctaatagccccagattaatgcattcattcctagccaactgaaggattcattacagtgctcaggctgaggctcctctgacaaatttgccctgggtaatgagccattcagcagctaactaccctgtgctgctggtgacctccagaaggggcagtgagatggagctgagcagacacaggtggagtacaaaagaagggagagatttgaggcatctctgggctttggggagcagttgtaagagcaagaaggtgcttctgagaccacatctgcctctggagctatgacaggagcgtgatagggtatgtggcgcctctgtactttctgagcctaacaagtgaggttcagagcaaggcaatgtaaatctctgctttgaaagtgaacatggattgggtaactaaaaagagagtgatacgtaggagaaacttccaaagaattgcaatctgtccctctgactaacatgtctacgtggagacttccaaaatggaaaatgagacatagcataacagaaagcaagaaagcctcctaaagataagctagcccagcagctctgcagagtatgactttaccctccagggaacatttggcaatgacttgagacatcctagtttgtcacaactctgtgcgtgcgtgtgtgtgtgtgtttgtgtgtcagggaagaaattagcatgaagatgctactggcatctagtgggtatagaccagagattctgcaaaacatcctgcaatgcacaggacagccccacacaacaaagagtcatccagccccaaatgtcagtagtgctgaggttgaggaacccggactaacccaaacgcctccttttataggagacaaagctgaagacttgagaaaagtgcctggctgaggggccagaaacctgtgtcttgtctccctccaggccatgcaaggcttgcttttgaatgctgtcctggacagtactttcagaaatgaagaggttccttctcctcccagactccagggcacccttcccagctcacatcttcagaaaggaaaattccactgcctgccttaatgaacttacgccggtctctaaacactttagtctaggaatatctcttctgggggttagcttattatctttattatgcattttagaggtggatgttactgcagataaaaataggaattcccagaggaaccagcaccagcatcatgatatgctgtatgtgcaatgttgttgcaaacagttccccatgagggtgagatggagacccctgcatatacacataactgtatctcacaattattaaatattgattcatctcagcaggggcctgtgtctgatttaaaataaaggcaagtgcattaactgatgctaatctaatctagacctatagcactgcaccctgggctgtctccactgaccctggttctctgattgacagtgtgcatgggagccatttcctctgccaaccattttgactctagaaatgcgcacacatgagtttatatctggagttataggatatgtgggatgtgagcataagagcttaataagaaagaaaggaggcctacatgatgatgaatagcaattacagggaattagattagtatcagcatctggagtaattgtaaacattttctggtgctgatgtttgatagtgttgggaaggggggcaggtggtggatgatagaaaggaagagaggccaaagataagaacaaatatgcaagtctatagtgtgtgcttaatggaactgagatttgtttctctgtgtgtctttttaagcctctagatagatcatgaaaaatacagccagctgggaaagaaatagcccaaatgtaatttaaaggacagctttttaaccaatacttcaacttggagacacctgtcctatgttccttaaagatgctcagctcaggggaggagtattaaagttgctgatttatcttcaggagcacagacctatttttaatttattgcccagtgacaggtttcttgtttagcttttctgtgttactcaacacaaccttctcagtaaagaagagctgcctgcaggacattgttttatttcatgttccagagccttagaagaaggaaccgaacttggacttctccaaagcatgttgacactctctctagcttcatggcaagcagcaaattgtgcaccaggaaatatagttgccttgcccactgattcacggcagatacacacacacacacacacacacacacagacacacacgatacttgagtgccttttggagtgtgtgtgacagcaatggtttaatcactcctgtgtcaatagttatgtcatagaaacctttgccagaaatatgtcttttagtactgtagagccacaagaaagaaaatgtgtgtgattcggtttatgcatacaaatgaacaatcgtttgtggtgctcctactattcgcaagaaacactgttccatgctgggggccataaaggcgaagcacacaaaagagataaaaacattataggtcctgccttctagaatctcatattcttgtgggaatgataggtacatatacgaatagttgctaagacaaactgtgatatactcgatcagagtggtttgaacaaagggcaaagaaggaataaattaattctggccaggggagttcctctgttcaacaaaatgatttgagcccttgttgtgtgctgggaattgttggtggaagggacagagtgtgcacaatacaaggtttggttctcatagctgttacattccaatgagaagagagagacatcagacactaaacaaatgagaatttcagagagtgtcatgagccatactaataaccaaagcatggtaatgagataggccaggaagctatgtgaggtagcatagcaaggaagggcactgagaaggggaaatttgaaatgagaactaaatgataaacaactaaatatgtgacactctggataaagagcatttcaggagaggaaagaaactataaaggcctgaaggttcttaaccttagcatctttaagagatagaaagggccgggtgtggtggctcacacctgtaatcccagcactttgggaggccgaggcaggtggattgtgaggtcaggagttcaagaccagcctggccaagatgatgaaaccccgtctctactaaaacctacaaaaattagctggccgcggtggcaggctcctataatcccagctactcaggaggctgaggcaggagaatcacttgaacccaggtggcccaggttgcatttagccaagatcatgccactttactccagcctgggtgacagagtgagaatccatcttaaaaaaaaaaaaaaaaaagagacagatagcagatcagggaactgagtgaattctgggcaaaatagtccaaggtaaagtcagagacttccttcaggggttagctctgtagcatcttagagacacagggacacaggtatggattgtgaatttaattctaagttcagtcaaatgccattggaggtttataagcaggggatgatattatttgtttttttttgtcattttgctttgttttaattactctagtcatgatgtacagagtggaatgtccgtgcaaacagtaaaaacaggaagaccacagatgtagtaagagtagaatagacttggatagtatttaccagaggggaaaaaacaggtcagtgtccacaaaactaaaaagcattgttgcagccccctacccctgcacactgcccctctggaatgcttatgcttgcggccaccacccaacgaagtgctgttgctggtggtctgggagcagcttagccacccaaccccaccaccatgctagagtgctttcaaacctcagctccctctacaaagtgctggtgccagtgatctgggagcacctcgctcccaccttccagtgcagccagtgctcaacctcaaggagacagaggacaaagccacagaccaagttccagcccaacagggttagagcacactgcccaggagtgatcagctgagccttggccctctgaacacctctggaaatgaagccatttgactatacccagcttgcatcgcagtcaagccctcaagggctgtaaagaacataaaaacaaaaagccctatccaaagacagtaacttcaaaggatagaggaacatcagccttcacatgagaaagaataagcacaagaattctgacaactttgaaacccaaagtgtcttcttacctccaaatgatcacactagctacccagcaatggttcttaagcagatggaaatggctgaaatgtcagaaataaaatttcggatctgagtggcctggaagatcaacaagatacaaaagaatgttgaaacccaatccaaggaaaagagtaaaatgatacaagagttgaaagatgacatgaccattttagaaagaaccaaactgaactgctggaaattaaaaatttactataagaattttataatacaattggaagcattaacaacagaatagatcaagctgaggaaagaatatcagagcttgaagatcactcctttgaataaatgcaggcaaaaaaatttttttaaagaatttttaaaaatgaacaaaaccttcaataatatgggattctgtaaagagaccaaacctacaactcattggcattcctgaaagaggagagaaaacaagcaacttggaaaacgtatttgaggatatagtccaaaaaattttcccagtgtggctagagaggtcaacatgcaaattcaagaaattgagagaacccctgtgagatactatacaagatgaccatctgcaagacacatagtcatcagactctccaaggtcaaagtgaaagaaaaaatattaaaggaagctagagagaaggggcagatcacttacaaatagaacctcatcaggcaaacagtgaaactttcagcagaaaacaaacaagccaaaagaaattgggaacctattctgagcatcctaaaagaaaaaaattccaacccagaattttgtaacttgtgaaactaagcttcataagcaaaggagaaatacaatctttttcagacaagcaaacactaagggaatttgttaccaccaggcctacttcacaagagttcctaaagggagtggcaaacatggaaaagaaagaatagtacctgccatgcttaagtatgtagcccactgacactataaagcaactatgcaatcaagtatatgtaacaatcagctaacaacataatgacaggatacaatcctcacatatcaatattgacattgaatataaatgagataatccccccacttaaaaggcatagtgtgtaagttgtattaagaagcaagacccaacagtctgctgccgttgagagatatatctcatgagtaacaacacccataggctcaaaataaagggatagagaaagatgtatcagtcaaacagaaaatgaaaaagagtaggggtcgccattcttatatcagataaaacagattttaaaccaaagttggtcaaaaaggacaaagagaatcattgcttaattataaagggctcaattcaacaagaaaacttaactatcttaaatatgtacaaacccaaaatcagaacatccagattcataaaacaacttcttagagatctacaaagatatttagataaacatgcaataatagtgggagactgcaacaccccactgacagcattagacagatcattgaggcagatatctaacaaagatacactgacaaacatgacacttgaccggttgaatttaattgacatctacagaacactccacaacaacagaatgacaacagaatatactttcttcttatctgtatatggcacatactctaagatcaaccacacactaaaccataaagcaagtcgcaataaattcaaaaaagtcaaaatccaccaaccatactctcagaccacagtgcaataaaaaaagaaattattaacaagaagatctctgaaaaccataaaattgcatggaagttaaacaacctgctcctggatgactttggggaaaagaatgacattaaagtaaaaataaaaaaataaaaacaattttcgaaactaacaaaaatggaaaaaaaaatagatcagaatatttgggacatagttaaacagtgttaaaaggaaagtttatagtgctaaaaacttacatcaagaaattagaaagatctcaaattaacaaccaaatgtcatacctagaagaactagtaaaacaagagcaaaccaaacgccaaagataacagaagaaaagaaataaccaaaatcaaaacttaactgaacaaaattgagatgcgaaaatccatacaaaagatcaacaaaactaaaagttaagattattaaataagagagaagatgcaaacaccatcagaaatgacaaaggtgacattacaaccaaccccatagaaatacaaaaactactcagagactattaaaaacacttctatgcacacaaactaaaaaacctagaagaaatggataaatttctggaaacctacagcctcccaagattgaaccaggaagaaattaaaatcctgaacagaccaataatgagttccaaaatttaatccataataaaaagcctactgaccaaacaaagaccaggaccagatggattcacagtcaaattttaccagatgtacaaagagctaataccagtcatactgaaattattccaaaaaataaaggaggagggactcctctctaactcattctatgaagccagcattataaagacacaatgaaacaaacaaacaacaacaacaacaacaacaaatcttcaggttattatccatgatgaacataggtacaaaaatcctcagcaaaatactagcaaacctaatccagcaacacatcaaaaagttaatttaccatgatgaagtaggctttattcctgggatgcaagggtggttcaacatgtacaaatcaacaaatgtgtttcactaaatagaattaaaaaaaacaaaataacatgatcgtctcaataaatgctgaaaaggctctcaataaaattcaacattccttcatgttaaaaacccctcaacaaattaggcatcaaaggaacatgcctcaaaatgataagagacatatatgacaaacctacagtcaacataatactgaacggacaaaagctggaaccattccccttgagaaattcaacaaggcaattattaccactctcaccagacctatgtaacataatactgaaagtccttgccagagaagttgggcaagagaaagaaataaaaggcatccaaataggaaggtaggaagtcaaactatctctcttcacagatgatgttattctacacctagaaaaccctgtaggctctgccaaaagcctcctagaactgataaacgaccacagtagagtttcaggatacaaaatcaatgtacacaaatcagtagcatttcttccttttttttttttttttttttttttctgagacagggtctcactctgtcacccaggctgcagtgcagtggtgtaatctcagctcactgcaacctccacctcccagtttcaagtgattcttgtacctcaacctcttgagtagctgggattacaggcctgtgccaccacgcctggctagtttttgttcttttagtagagatggggtttcaccatgttggccaggttggtctcgaactcctaacctcaagtgatctgtctgcctcggcctcctaaagtactgggattacaagtgtgagccactgcacctgactgaaatcaatagcatttctctacaccaataacttccaagctgagaggcaaatcaaaaacacaatctcaattacgatagccacaaaaagagtaagatacctaggaatacgtctaaccaagaaggtaaaaaatctatacaatgagaattacaaaacactgctgaaagaaatcagaaaagtcaaaaacaaatcgaaaaacatttcatgctcatggataagaagaatcaatattgttaaaatggccatacttcccaaaccaatttacagattcaatgtaattcctatcaaactactaacatcatttttcacaaaattagaaaataaaaactgtactaaaatctatatagaaccaaaaaaaaaaaagaccccatatagccaaagcaatcctaagtggaaagaacaaagccagaggcattatattacttgacttcaaactatactacaaggctacagtaaccaaaacagcatggtgatgttacaaaaacagacacgtagaccaacagaacaggatagaggcctcagaaataaagtttcatacctacaatcatctaactgttaataaagttgacaataacaagcaatgggaaaaggactccctattcaatagatggtgcaagataactggctagccttatgcagaagattgaaactggcccctttcttttaccatatacaaaatttaactcaagatggattatatgcttaaatgtaagacctaaaactataaaaacccttgaaaacaaaccaagaaaatatcctcctggacattggccttggcaaataatttaggactgagtccccaaaagcaatagcaacagagccccaaattgacaagtgagacctaattaaacttctgcacagcaaaataaactgtcaacagagtaaaccgacaacctatggaatggaagaaaatattcatcaactatgcatccatcaaaggtctaatgtccagaatctataacgaacttaattcaacaagcaaaaaacaaataaccccattaaaaaataggcgaaggacatgagcagatatttctcaaaacaagacatacatgtggctaagaaatatatgggaaaaaaaagctcatgatcgctaattgttagagaaatgcaaatcaaaccacaatgagataccatctcacaccagtcagaatgctattattaaaaagtcgaaaagcaacagatgttggcaaaattgtagagaaaagggaacaggtttactctgtttgttggaatgtaaattagttcagccactgtggaaagcagtgtggagatttttcaaaggacttagaactacctttcaatgcagcactcttgttactgggtatataccacaaggaaaagaaattgtcccactaaaaaaaaaatacactcatatgtttattgcggcactattcacaatagcaaagacatggaatcagcctatatgcccatcagtggtggactggatagagaaaatgtggtacatatacaccatggaatactacacatccgtaaaacaaatcaaatcatgttctttccagtagcatgggtggagctgcaggccattatcctaagtgaacaccaaatacggcatgttcccacttataagtgggagctacacattgaatacacatagacacaaagaaggaaacaatagactgtagtgactacttgagagggggaggatgggagaaagatatggggtgaaaaactacctattggttgctatggtcactacctgggtgactggatcattaatacaccaaatttacccatgtaaactcacaatttacccaagtaacaaacctgcacatgtactccctgaagctgacataaaagccaagagaaaaaaagaaaataaaaagcatcgaatccagtttttggcctgtgagagtgaagctcaaagggaggttaaggctgatggcatgaatttggaaaccatgggtatctgatagcagttaagccacagatgggatggaagggagttttagttaaagaacagggctgatggtcatgaaatagaccatgtcagcatttagagtttgacattaaggaggagtagccagtaaggtaagtagagaataaggacagtgtgatagcatcaagccaaagatggaagggtagatctgctcaagtactgctgaaagattaaattatattgaggacagggaattgggcattagatttggtaagatgtacctcctgggatttggttacacagagattggggaaaatgattctattaatagttggattggtgagtgcatatttgtgtgtgtaattctatttttgatcttttaacatgtcctgagtactatgtaaataatctaaattaccatttgtcataaccaccctattaggtattgttttttttttaattttgaaagagagatgtttattgatttttaatttttttattatttaagttctagggtacatgtgcacaacgtgcaggtttgttatatatgtatacatgtgccatgttggtgtgctgcacccattaactcgtcattgacattaggtatatctcctaatgctatccctcccccctccccccaccccacaacaggccctggtgtgtgatgttccccttcctgtgtgcaagtgttctcattgttcaattcccacctacgagtgagaacatgcggtgtttgcttttttgtccttgtgatagtttgctgagaatgatggtttccagcttcatccatgtccctacaaaggacatgaactcatcattttttatggctgcatagtattccatggtgtatatgtgccacattttcttcatccagtctatcattgttggacatttggattggttccaagtctttgctattgtgagtagtgccacagtaaacatacgtgtgcatgtgtctttatagcagcaagatttatattcttttgggtatatacccagtaacgggatggctgggtcaaatgatatttctagttctagatccctgaggaatcgccaccctgacttccacaatggttgaactagtttacgatcccaccaacagtgtaaaagtattgttattatttgcattttgaaaacaggacactgagaaattaaataactttctgaaacatatgtctgtttatacatttattacttatttatttgagagacaaggtctttccatgatgcccttgctggggtgcagtggtgcagtcttggctcactgcagcctcaacttcctgagctaaagtgatccagcctcctgagtagctggatctacaggatcatgccagcataaacagctaagttttaaaaatttttttggaaagatggtggtgttgctatgttacccagggtgatctcaaattcctaagctcaagccatcctcccacctcagcctcccaatgtgctgagattacaggtgtgagacactgcacctgcgcttataaatgtattgaatacgactaaactgtatacttaaaagtggccaaaatgataaatgatagatacattttaccacagtaaaagctttgaaaaactatggctagtagatagtagattcaggattggagcctgagtctacttggctcccgagtctgagttcttggctatggtcatattctgcagatttgcatagagcccttactgaatattaatccattcagatagagagcaatgtgtgatatttatcaagcataattagagagaagactagaagataagtggggaaggaggagtgcctaatgtctcaggacatgtactttaaaatttattctgtgggtggacagagttggcaaattttgaacttttgaattcattcactcatttagtatcagccatccagccaatatctaataaggccctaatggaagacaaggtgtgtttagctaggactaaatgatcagcaatgtttcagacatgtagacctgaaaagcaagcatcttgtaagacaagataaacattatcaaccaaggcaggaagtacggaaagtggcagtgaattctttggtagaacagtcacagtctagggtggctagagtgctaaatgggagagggccttgaatgacaaagcatgggtttttaaatcatgttatgtggacagctatgattaatgaaacataaaagatcatgaaacatcagcaggagaaatctaagaaaggcgtgacaccacaggtagggatgtttggtgactgcaaagcatggtacatagagtgtagttcacctaattcatatggaggaggtttattacatggttaaagatacaaagggtcttaggttctgaatttttgttagttttgaggcacaacgtttgcttctatatgcttttctgtaattggacatattttggattgggtggtcaggctctttgatgtgcagagataaatgaacgctgttcagtggcgtacatcttttacagttctcaatagcaagagaagatgctggcataaaacccacacaattgcatttctcatagtaagtggtcaggtgacctcttcccctctgtatccatagataggggagaaattccttcctgagtgataccggggagtagatggccttgtgtcaagattcactgacatcctgatgggcctgctttctcctgctgggaactggtgagcgagaaagaagagttattgtcaaattcccaacttgccctttttgatataaagttcacttgtaattttttttttacttgtgttgctaatgcattttgttctcccaagtgtgagagacctagcttcctctgtagcctttaattagtttctgaatgatgacatgtctactgagaagcaactggttgcgtccctccaatctcggggggagataaaggaatctaataaagacattcggtatttctaggtgatgtgtttgacaagctttgtattaacaagaagtcatgttgaaacttctctctttccccaactgcactgcctcactcgctccagcactgtgacatttcacagggggattaacagagctgccactctcgctgagaacttgtagtttaaaacagacagacctgtgtctctacccctcatgctaaaggggaaggagcttcgccttgatctattcaccagccataacctttatgagggatttagtggcaataaggtcttggaacacaaaatcaacggataagtttcctttgacagcagtgggaccacctcccaggattcaagattcaaggtcggataatgagatgtgtcttcctcgcagctgcctagttattccctaagacggtggtcacaaggagtgtgggaacaactcaagttttaattctggcatgagcaatattgggactgtagcactagagagaggctgaaactcttctcagggctaatgaccctcctttgctgaactcaactgtgcagttatttggagaacaagagaaaaatctctggaattatttgcactttactgcagtcatggggtgaggtgtggtggggacttcaccacagccttcttactgcagtcagcataattccctgctgcatacagttttatagcttgtgtttgagtgcataactaccagtgcttttaggcaattaagaattaaagtgccgatgacgccatgaaggcagctgagaatgtaagtgagcttggcgctgttggcagccagcagattgacagctcagaaatgcaggtttctgcagagctgagagccgagagcggcgaccacctggggacaggggcttagtctctatctggttgacctccatttgacctgagtgaggcagcctaggagagaggaatgattattacctgagtatctcttaagggcaagaggagaacattagcagaatcatggctcagagtctaagaggttaccatgacctatacatacatacttacatatttgtttacctgtatgatatcaagatgtagaaatacaaacttcatcccagggtagagtaatggcacagactattatagcaaaatgttttttctctctgtgaagtgggtttctgaacagaagcaagggcatccaaggggcagagttagctaacatcttcctgattttgcagacaaatgacccctattgaaaaggtagtgggattacagaggttgaagtccttagaactagaacagaagtgtgtgtacctagagtgtccctctaattgaggctggagctgccagtggcaccctctacccatgagttttctaagcctaatggaatggggtcttgttccatttctatgaagatcttttggagattgtggaaaaagtctgtctaggggagagaagcaactaatggagtctggtatatgatagaagtggcagtcaccattgcacagcttacagtatctggtcacttgagtttcatgaacatcagctgcattcttgctttgggaaaggaaagtcacagtaaggtgccagatgccaaaagagcgaaagacacagcttaacgaggccttgcggttgagcctcaaaggatatggcaaggctatggcggttgggaactacaggaatagacaattcctggtgagaagaaattagaaacagtgatgtcagaaatctcttgccagcccctggctctgaggagaggatggatgtgaagaaaccttgcatgtcaggagatgttgctgagcactataaataaatcctggtcagcacatcagggttggtttttacagcaaacaattatgctgtttaccactaattcattgaactctgaattatctcaatcacaatagcattcatttgcagagtgattagtaattcactaagtgctttcaattatacctacatattttattggatcccaaatccctgtaggaagagcttgggtctgagaacagccactttctagctcagtggcttcgagcacatcattagcagggtaaaacctcagattcctggatgaaaagggagagtatatgggaagcccttattaggtcttcaacaaatattagttttctcccatgaggaataatattaaaaagtcatatttcctctgtttttacttctgttctcttcctcacgaaattatgtaatgaattagattaattgattcctttctcattgtgacgttatttcacgttttgaggatcttttgcttgtatacattttggctgtcagttttcagggacaccttattagagaatctgcagtgtgtctgacattctccatgatggttttgggttacttgtgtaacctctccaagcttcagtttctcgactacacggtggggaatcatgccttaggagttacggtgaggatttacaagggagcagcaaatgtggaacacctggcaaagtgctcggaatagaaggtgtttggtgtttcttttcttcccaccccatctatcctcccttcgtgaactggtccctaaagagagaggcctggtggtgaagggcaataaagccagtcatatagccccaacccaaagcatgcactgccatacatggaaaacacgcacagctgggaaacagatggccctgtctggatggcaggtccacatcatgatcactgatacaccccttatgtttccatgttaaaaaattgatgaagagacacttcttagtaatttcttagatgtgacccacataatagggcacttatgattacaggtagttgctgtgaaattcaatttttaccattatgccccgaagccaagaggcatggaataaggaaagaatggtatggactgcactctcttatgtctccatcaggaatgactaaaactcggtcaagaggcagagctcataaagacttccttccacatttcagttgatcctgaaaggaacaagttccaatcttcagaagcactggtttatgactaatcctgaaaaaatcactaggtttttttcctagagcttcagggttttctagccaacatgaatggttttactatggagggcgagagaaggaatgagatgtaacaaatgacaaaagggttctggtgaagagaataataatccactgaggttatgccattaaggagctttctacattttcaagctctcatttggaattctgattgactgtaatctgacccttccgttcttgaaaatgatggcagcaagcgcattgctgacaaaagaatggggtcctgttgcacagcgcaccctggcctggggcctgagtcctcatttaaagatgctgtttatcctcaaaccttgagcacatcagcagggcgtgtggtgcatcccaatgtccaaaccaaaacagccccctactgcactaaaaatctctatttctcttcgtattggtctctacaggtacacatttttagtaacactaagaaaggacatttgattaatgctttatgtataaaaagtgatttcttaacattttaatctgatccacagaacatctattttgaggagaaaagataggtgttgatatataatgaatacaatcagagactctaatgattgccatgcacttatacagctagtaactgtggggtgtgggcttaaaacctcggcttctgatatgaagcttagggttctttttttatcaaaagagaccttagggatcttcatgtatattcccatgattccatgtgcgtttgttatttttctaacccatattatttccatttgaaaaaacactgcgcggtggcacatgcctgtaatcccagcactttgggaggctgaggcgggcagatcacgaggtcaggagatcgagaccatcctggctaacacggtgaaaccctgtctctactaaaaataacacacacacaaaaattagctgggcttggtttcaggtgcctgtagtcccagctactcgggaggctgaggcaggagaatggcatgaacctgggaggtggagcttgcagtgagcctagatcgcaccactgcactccagcctgagcaatagaatgagactccatctcaaaaaacaaaaaacagcaacaacaacaaaaaaaaaacactgcaattttcagctgtatgtccttgaacaagttccttgactcctctgagtatcggtatcctcatctgtaaagtgtgggaactaattaggatgaccaatgcatccccatttgcctgaaatgcttttggtttcagcagtgaaagttttatgtctcaagaaactctccaattccaggtagacctgggcagttggttgccttagagagaatatctatttgtggggttcatacagtgaaaaataaaataaaggtaatatagccaaacacctgttatacagcaggtatttaataaatggtaattatcaacatcattatgttcacttacagtccttgggggcaatttaaagatcttgaggaaattcagtcatttcaatttgtttgcatttgcatacagccttgagagaatacagtaattcattcactcagaaaaattgttgaacacaaacgatgccaggcattatgatatgtgatgaccattttcaatgaacgagacaccagtggagcttacattgtacttaggagaggcagacagttgtgtagcaagccaggcaggctgggggttctcttgtagaaagggggtttgaggaagccttctgtgaggagctgaaattgaaataattagacagaaccaatgtgagtagcaggagaaaggcaagtgtgaaggatggagtcaaaggtgggcttgaggcatttgaagaggacaggtggccagcagggtgaggaagggagaatgctgtgggaagagcatggagagggaggcggcatccagagtgtgcaaggcctttgagaccaaagaaggagtttgccttcatgctccatgacagattcatctctccgttcagtgtggatgagagaagggaggtcctaaccaagcacatttgccacagcctgaatcccacctgaaccactcaactgtgcctaggcttcgcttgggtacacagtggcccttgggaaaagatggatttttctcaaaaccaacacctgcttggttgcatctttccaagctttccaatctgggttggacattcatgcaccaggctgttctcataggccttagtgtctctgcacgtggtctggaagccagaaaggttaagagcactccagatttgtcccattaattctgtaaagacaaaggtccctaaagaggccttagcagtgaagcagcccttgctgtgagaactgcccggaggagatgcgggcatctccagtcttcaagatagaggagaggcaggaggggaacccccactgccagccaaggaagccatctgggatctgtagatctgcatgcgccgtgcagttacctggtccaagtggcttatgtgcattctcagccccacaggactgcacagtgcttcataaagcatcctgatttggatttaataggatatccactgtgtgctaaaaacagcaaattgctatttattaatgacataattattaaaactcaacacctgggcagtggaagctaaaccaagagtagggaagttcctcagaatactgttttaataattatcttatttaattatttacacatttgaattaaaattcaataagagccggattaaacattaacctaatgtattaaacatggaactgtatccaaacagcatggctcccttggcttctgtctttcttcctaaacataccctaaccactccttggtctttcggtttctataattggtatattttctagattcagctctcagaagccaggaggcaccacatacatgcctgtgggtaaaagccaatgaccttttcaaaggactcttccactcatagcaggtctaatttactattggcacgtcagttcttacccctctgctctttacctttcatgtggattctcaaactgggatcttgcccagacctccgatcctctgattccaactgctaacataatagtaatattcttcctggatgtccctcatcatctcaccatcagcaagtctaagatagaattaatcacactaatgttctccccaaaagtagttccccctagaaggtctaggggtctccctgtgcagccgtccagatgctacttaacagaacggcattcctgctcgaccccatctccctggttgtcctcctagcaaccatttgtgcatttttcctgggcatggctctccaatccatcccttgcttttcatcttttcagagccaacagtttaatccaggctttgaacatcactgtcgattgatttctgtgactccagtttctgtctattttactccatctgacacaatgttaacagattctttttcttaaaataaatttttaaaaaattacgacatttcttttaaaaaacttcaaatgcttgtcactgcctgtaggatagagctaaaacctaggcactaggcattcacgcccttccatcatctggctgtcattcacttcatgatcttgtatcccatttttcattgattctgtcaaaatttatggactgtccattctgtgttgacactgcatatatgtgtttgccaagcacatacaatattaaaactcactcattgagcacttcacattgccagaaactgttctcaatgcatttcataacttactcctatgtctttgaaacagtctttatgaggttcagacagttattagctccattttataaatgtggagagcaagacacaggcaggtgaagtaacttggccaaggttgcccagttagaacatagtagagccggatctcagcccctgctctgcgttgcctcttgtagtcaatagacattgtatttcttcagtttgtggatttctgccttcccatctgtgcccatgcaattctgtcccatttgaaacagcttcactttttctgcctagatacctgtttctcatttgttgagacctaaaataaactccaatttgaggtgaagccatctctggaactctctctagctgttatcctccctcctagtaactcatagcacttaaagtttgtactgttcattcacattcaatcatacacaattttccaacatattttgccttgttattcaactctctggaatgtttacatgccctgtttcctcaaacagattgtaagttcatagagggccaggcaaattggtatatgtctgcatgtctttcatatacctagcacaccattgtgtaacagtaggtgttcacaaaatgttcattggatgacttttggcccagcttctaaagcaagggtctccaaacctcaggccacataccgatactgctctgtggcctgttaggaaccaggccacacagcaggaggtgagcagctggtgggtgagtgagtgaagcttcttttgtatttacagccactccccattgctggcaataccgcctgagctctgcctcctgtcagatcagtggcagcattaggtaggagcacgaacccttattgtgaactgcccatgcgagggatctaggtcgtgcactccttgtgaaaatctaatgcctgatgatctgtcactatctcccatcacccccagatgggaccccctagttgcaggaaaacaagttcagggtttccactgatcctacattatggtgagttgtataattatttcattatatgttacaacattacaatgtaataataatataaatacaatgcataataaatgtaatgtgcttgaatcatcctgaaaccattccttcccgcatccccagttcatggaaaaaattatcttccatgaaacctgtccctggtgccaacaaggttggggactactcctctaaagtagacttcttccattaacagttgtgcctggccacaaaatgtcttactgatagtgcttgccttatgttgtctcctttgcctaggatatctttcctccttttctctccagatatgattaatttttacttactcctagggcttaacttaggcatcacatatctaagaagcctcttgtggcatccatgtcaaggttggcttagatgtatatcctctgtgtctccataacacgtgattcaccattctgtgtcaccatacattagaatattaggcttctgcatctattttgatatcttgaggctgtgaactccttgaggaaaaggatggtatcttatttagtttatgtctctaatgcttggcacaatgctggcatatggaaagtgatcaatgaatattgaagaaggagtgaatgaatgaaaataagcaaaacaatcctagtatgtttctaacagtctgagtgatgagaagtcagatatagaatgtatccatggaaacaatataaaaatataagtagccctatctcacacttggtcagaagcttccttatgaggatggcttagctaaaaccacagtgcaccctaatcaattcaagtagtcttgaatactgacaatgtactagaagttgccacctagaaaatcatattttgactcccttagcatcttaggcatatgccaatttgtttctgataattgggattgctcccctagtcaaaccacctcatctctatgccatgaatgatctgtctttctcactcacccaagggcaatttgcctccttcaaactgtattcttaggcagaatttaaaggacagcaagcacttctcaacttctacctcatgagttggatattttccaattattagtggggggagacaattctagatgattcttccaagcatgaggtgcgattgtctcatttaatatacttactgcactgacagctctggcccaaaccaccttctgtcctgcttggggactgtccattgttctctagtgtatgattagcagattacctatcatgcaggaagccaggaaaatgaactcacagtaagcccttccaaagcaagagtaattcattacccggcctgatttccacttaaaatgtactttaagcacacttccaactacaaaccctaaatcaccctgtgttcacaaagtccatcattttttattttattgcatggcattggcgtgacataatcccttgcagagcatctcggagtgctttacagatcaataaattacttacctgcacagttgaagcaacgtctgcaaggccagcacagacattctgcaggcagcctgtcctccaggaagcaagcaaggctgtgtgggtgctaagagtgagcagggacagggaccagcaaacgtatgggttggtgttggggggtgggggaaggaggtggctggtgcatgagatgggaatgctctagttaaaactctgaataaaacacatcaaagtgtctatttttgcaatgatcaatttaaatgattccagaactaagagaatttagaagcttgtacccttcaggcagtcagcaaatcaaatgctcagtcattaactcatcagttacctttctgtcctggaaggctccatgtagcttttaaaatgatataaccataaatggcattgttacatcttaaaagtcccagattatagagctagcattctctctcctccaacccttgtccatgtccactctccattatttctgtcccaccaaatgcttatgggagtgcaattgagtgtgtatgtgtatgtgtgtgtgtgtgcatgcatatgcagagacacacacgctgcctatctgaagctcaatgaggatggaaatctaaaaatgattaactgttgcttactctgtgtaacataccctatttaggacagcaaaaaactaaaaagttaaatgaggatcttttcaaatatcttatattaatgtaatttatagtataaaaggaaaggtgggaacatgttacataaaagtttactttaaatgccgtataggagacactacagtgctgtggaatccccaggaaggagaggtcacatcctcttcaggttcatctggacagccttattaaaggggtggtaattctctcaggccttgaacaattttaatagatgtggataggcacagagaagagtgtaagcactgaagtcagcaacaagggcatggggataaggagatagctcagtgcagcacagataagtacagcacacgcttattaatgatgagcatttcaattgggtggatgcaggacatacatggaaggtaacactggagaaggagagaaggggaagaaggctaagatatctttataaactcccttttcatgaaggaaaagatccaacacaactaggaatgagtgagtaatggttcaagtagaggcaagaccagcattaaaatttgcaaacccatctgattttagtgtgagggccccactctgacctcgcaacaagcaataaagtcatcgtgcagcttccctgggctctccggcaggcccgatcacattgtaagccaggtggatggtgtgctttagaattgcacagcatggtggctctgaggaatagttattcaaggaaagaatataacatgaagaaacagaagagtgctggatggaggggacacttaacttgccaagaactaagaagtcaaaaccagcatcaggagggttgaaagaatatctgccaatgacccaactctgaggttggtatggacacgttgcacacaggttgggaaggtggttcccttgaataaccattatcactcaattctgtaaatatttgttgagctcttagcgtggatacagatataagtaacacattgttcaggtcatcagaaagctcatggcctagtgggtgatgctaagcacataaccatagcatagtgaaataactgtctagaattggagtgtgggagctcagtaaatgacatctttactccatccacttgaatgttaaaacacataagacagataagtagacacatggaaccaaatatcacatgtttactagtggtaaagctgagactggagaattaggctcagatgtgcagcaacaatgaggttctacgactggaccccggaaagaaacgcacacacatgcaatggctggatgttccacaggccctatccagtccttgtgggtgctgcttctgaaaataagcacatggaggagcacaacataatataagcttcagaaggttccaaaatagaagaccaaaggaagtagacatcctgtctccaactttacctattagaatgaaccccttctctccctagggggagtcatttagtggagaaagaaggtgggggagagagagagagagatgttatggctaactgaggcttaatttgattccccaccaggtgtgtagaatgtgctctgggcacatggatgaagaagcagcagtcaatttgagatgtccaaaagggcagagaagtatagagggtagggaaagtttcaacaaagaaagtggcatttgctttgggccttaaggatggctgcgcgtgcactttgataggctgaggctggtgaattgcttgagctcaggagtttgagaccagtctgggcacatggcaaaaccttgtctctacaagaataaacataaacattaacaaggaatggcggcacatgcctgcagtcccagctacttggactgaggtgggattgtttgagcatgggaggtcaaggcttcagtgagccatatttgcaccactgcactccagcctgggtgacaaagtgaaaccctgtctcaaaataaaaatgaaaacgagaatggctgggagttgcccaggaaggataaaaggaacaatatgaacccaaatactttatgcccagacagggcatgatggagaacaagggagtcagcagaggtgggatcactggggatggccatggaaaggtgggctgatgcttgattctgcatggcctcatgcctagaaggagtcaggctatgaccaggtggccatggggagccactggagctgtttagacagagatgtgatatgatcagaattgcattctttcaagacatcgctgaatgcagtgtggaggatggctcgtggatatgtgttggaggtgggtgggggtgagtggatacaggaagagggtggaggctaggagaacagctattccagtgttgcagtagaatttattcccattcggactccctgactttgtgtttaaataggaggaaatcaaagctaaattaaaggtaagacttttttatgtttaaggtaattcctctaatttcttatcgttaacttactgtagtccatatattttactctctggactgttctgccaactaccatgttaagacaactaagaaatgtttcaggaggatttttattttcattctgtcttgtttccacagtatctcccaaaattgtagagatttcttcagatatctccattaatgaagggaacaatattagcctcacctgcatagcaactggtagaccagagcctacggttacttggagacacatctctcccaaaggtaagagaacagtttgttgcattgcatcatgaggataaatgggggaattttgggcctttggtaggaggttatgggtgctgatacctactccagaggagtctacgtttttggtggcttgatggtaatctactcatggctctgcagagaacgttgatgttctctgcaaaacagccataccctctaagatttcagaattcatacctcagtatctctccagtcccttggaaattaatctctgttgtctctgggtgaaatggtggtaaggtgttctgggtgaactttacatgttgtttgatgatggaacaaagctttagtggcaattgttcagctggttgttttaaaatagagaaaacacataatgatgggtgagagctttaaatggccatattcctaaaaggagattctccaagtctgtgcctctgcagccttgccaaaaatctggtcacgagctgtttttgtggttttgttgttgttttactccgattgatcctagagaacaaatataacttaatatgtgactaaattgcaaaaatttactttatctgaatgctcagatgttacgtagaccaaagtgttgttttgtgctttcatggattgtacattaaaacctttagaatttgagacaagatgtcatttattattaagctagcttttatttgggaacaagaaagataaaaatatttcattcttaaatatttattgagtgcttgtaatagtccagcctctcttctaggcactgggggttacagcaataagccaaagcggtgaagttttcacactcatgaactcacattctcatgagacagatgacaaaaaaaaaaagagtatgcaatataacaggtggtattaagggtgagaaaatagaacaggatgtgttgacagaatgacaagagctttcttcagagaagggctctgaaaagaagatatttgtgcagagacatgaacagtggtccttaattgtgttgcttattgctgattaatgtgaaatgtgtgtatgtgattatgtatgtatatatgtgccggtgtgcacagatggatgaaggtgtgtgattggcatgaaagacgcatattagggggtgcttttggtctcaactcccatggaagggaaaagtgggaaacagaattgggcaggttagaagctggcttgtgcagtaggacatctcggctgagcctacggggagctctgaagctaggattgcccttcagaaggttcccttattgaggtgatggagctggtcctctacatcggcacagcagtccaaatgtaggctgatccccaaacaggtgtgactgtgggccaggcatctctcttcacatgagacacagggggctgaccaccgagggctatccaccagcagccggtccttctgtgaggcataagtcctctgctcctgaaggtgactgtgcatgacagtgtccactatacttcaacattttaataaatcagagtaagactatgaaggggccccaagtaccaaattctagacagtgacagttggccctaatggatgttctcagagaaggcgtgacattttcagttgtgtgtggcctgaattcctgggagctgtcctgggccaccattcttttttttttttttttttttttgagacggagtctcgctctgtcgcccaggctggagtgcagtggcgggatctcggctcactgcaagctccgcctcccgggttcacgccattctcccgcctcagcctcccaagtagctgggactacaggcgcccgccactacgcccggctaattttttgtatttttagtagagacggggtttcaccgttttagctgggatggtctcgatctcctgacctcgtgatccgcccgcctcggcctcccaaagtgctgggattacaggcgtgagccaccgcgcccggcgggccaccattcttgacactgtaactgtgaacaaggggtctttgaaagctattcatgtgtctgccagtctctccatttgaaatgacctcacatgtggactggcccaaaatcagggaggaagcttcagctgtgcatgagatcattagtgatggaaaatggccctgggcccttctgaaggaggggccattcagacaggtgcatgctaagtccgcggtgtgcaccattcatcacagcctgatgtgagtccccagtgctggcggatgccagcccagtctgtgcctttggagtctgcagaacatttatcatcagggtaagcttcctgtgcctgatgtcaagaggctctgtcttctgtttgatgtctcttctcattccctcatctggccagttctttgtccttttctgggtgtttcttcccccacttctcctgcatgcgtctcctttttgtcctgccattttatgcctataacttcccgataagttatttttgttgttgttctatgctttggctttctcttgcagcgtctgaaatgtttctgctttaatttcattattttccacattctctcttccctccttgcaattgtttgttgtcttcccctctgacatttgagcctcttgggtttgcctggctgatgttcacaaggctgtgtgttagagtcttttgtttccccttttgtgaccatcgaacagattcatttcccaagggaacttttgcctgagcctgggccaggtgtcccattttactgaggttttagctgctatggaaacagaagatggagcaaggaaagaggagcaggacaatcagaatgtacctgtggattaatttacatgaacagtgttttccagatctcaggtccagtttagttatcccggattcaaaatgatgagacatgccaagcaataactaatcacctcagaactcaccagagtgccatttcccagtgactgattatttggagatcagagatgtcacttggctgctgcccaatatgaactgaagctggagaccctcaacagtcaggccttcatctttccccagtagtatttcctaaaggaggcttattctaaataaaccaggatgggcttggtgttccttggagaagaagatctgcaccttagcggaggctccaaagaaagagcgctgttgtcatcttttgtgtcattcttcgagggtagatcacagttccatcaagatctttcttacatgcgaacctgccaaatccctggatgaacagctgatcagggctaagctctttcagcaaccctgatgacttcattgcattttttctctccagactgatctgtttgttctgtacatttcttaaaagtccttgtttccttcattatcacttatgtggtgctgcttgcgataaacttatataaacctctttaaattgtgcatttctagtcttgactaccttgtgtggaaaggagtacagaaatgttaaggactattttagacgtggctcatacactttgatataggggcagcttaggagtgaccatcaggtggaaacggagatggagggccctgtgtagcactttatatcagatagagaaaatgtcagttgtgcatgtccagtacagagagggaggtaggacctccaaggccacctcttggcacttccattgattgtttgaataatttccgtatattattatgggcattatgcctttgtagttcccttcaggaatttatcagaattcaaagagaaagtgagctagctttttaaagattcctgccctgactctgcacaactggtttgagatgggccgatgttgtttgcatctgcagagaccttggtcttttcaggaggaagagcccccatctcactcctctcactagcaggagccatctccatccacatgaaggcttattgaccccaagccggagtccttctaagtgctagcatagggtactaggtgcacaggcaccgttggtggaaccctaaccttctgtaggtagaaaaaaggaacagggcagccaactgcccactgtgcctggtgtcatgactctgtgctttgccctttgtctacatctagaccttcaagaatgtgttttttagcacatcccttaaactctcagctttctgtctccaatagaaaaacgttcatgctgtctggttctcctgagtcttcactatgtaaatagaagcatgatctctttcaatatactccaaaagatgctgtgttggacctcactcttcatagaaaagcattctgaaagccttattgttatgttaccagtttcagttggattgtaagagctttaaagacaagtctaggattcctacattgccacattcctgagagcccaaaatgaaactcaggtgagggagtgagtctcatcacttatctgtgggtgtcactatccatttgcagccagggatcactgagtgtcctaatggagctcccatcttgggtgcacttaccttcacctttctgtcatcaaacaagacactgacaataaaaacctcatctaggctacctagataacacgttgtactgagatattggtagggatattcagcaaagccctgcaaggtgttcacagaaatgtcctcctttccagtttattttcaatgtccctgtcccatgagttctttgagatcagagtttgcatctcacttctctttgattctctccttctagcacaatgcctagcacctaggaagtgtttaataaatattggtcagttcagtgaacaagcactgatatttgccaatgccccaaagaggcatgcctgttctcccagttcaaagactatcttgatccttcagaagttgtccttcactttgatgttggcatggagacctggagtgtttctggctggcgagtctccaggacattttctctggtcttcacaagatctccaagcctttcctgaagtccccttgaggggaccttgctgtggcaggactcaacttgtccttgaagaagaaactccttttcaagtttccttttgcaagaagagaggaggctcacaggtgacttggacagtgggtcatccatgagcttccttctgctgtcatggctgcctcattgcaactgctcttcatctggccattctagtgggcatctggcccttttggtgccttgctgtaccaagtactcctgtgtctaaaccccggatgactcccaaccactatttcctaaggcaatcccgatatcacctgggggattatttcaactgtatatgaaaatttgccattccttataggttaactaaagaaaaaggaaaagaaagaaatcaatcggtagaaaaaagaaaagtactttaaattcagttccactcttgtgcctctttctctctctctctctctttctgtgtgtgtgtgtgtgtgtgtgtgtgtgtgtgtatgtgtatgtgtatgtgtggggtgtgtgtgtgtgtttctcaggttctctctttctctctttttccttctttctctctgcctcctgatatatgaattgaggtgggttagagatcaaaagagatcttccctagggtgatataaagaccctgggggcagaattagagcagagccttctgtctgttggattccaagccaagcccttgttctgcaagcctttctctttacctaacgtgaagtgggtacatctgcgtggcctactctccataccaacagggctcagtaaccttcctcagctgccagatctcttccttcccacctcagttctccttttctacttgaagaggtccagtggacatttgactgccctgtttcttttttctggagttttaaaaggcaccaaattgatggaggcaaagtgacacccggataagagttctcctggccaatgccctgagccctgtgctccccctccccttccccaatatcctcaccccaccatacatccacctattttcctatttgtaagcactgacaaggccttctcctagccaagcaggacactaaagcactaattggcactagaggtatcacagcttgagttcaaccagagctggcaggttccatgactccagtgacagctctgtgaaaaagtgtcaggagcagagctctggcgtgccatcggctgactgcagcaccctggaactaatgagcagcctgtcagcaccagcatccggggccccgtgtggcgctgagatcattagaatggcagaggagaaagacttcctcagcaaagaggagctggggaggggagaagagggcaaaatggaactaaagatatcaccttacccacagagggcaaccacccaacaccaaaggactgagaagaaaaagggagaaagagagaaagcaaaagtttttctaaatccatctatgccaattctagacaactcttggaatctccttttggttgggttgccctgtcagtaatcaatatgggctgtaaatccttgcaataatccaagaaggggcctcagtgattaaattaactctttagtcttggctgtgctctgaaacctggaagtcgcccaagtctctaggaaagagggacctagggcgtaaggcaagacttgagatcttagtctttttgctatttgtcagggcaggctctctacctagggtatctcctgcactgccagctgcctgcctatcttctgctagagtatcagaatccaggagagacaattaatagaaggagttttcgctctgttattccttcccagagggaggtagggggactagtcagtgtgtccactctgtatctgcttcctgaggccaagtatgaattatccatcttgttcgttcttctgcttcaggaccagaactgggccttcaggtctgagcattaagcaatgcctggctcttctctgaggcttctgctactaacaatgactgcatttccatgagcaaaggcagcaatgtgtctgaaagagataggctttgaaggcaggtccaaggggatttgtattcccttgcactactcactggctgggtcatgctggagtagtgataaacctctctgaagatgtgcttctttattaatttcattcttgcttcttggcgtgaaccctggcgttttcatgatttggttctagaccccattttctccacacaccacagtcacactaacaacttggcattctccacacactagatgtctttgactttgcacaccccatctgttctccttccatcccccctacttcttttggtttgagttctgcccttgtttcaagaccatactcaagtgctaccagtttgaaagcctctggtgactttcttcaggcagagtgattcacccatttctttgagatcccacagcactttgcgtgcatttccaactatggcacctcttacaggtactcaagggcctctgactactcctgtcatgccagggatcatggcagccaggaaccaccctaatgctgttttgtctttagtgtctgataaagcaccagatgttttggggtcttgtaaatgattgttgaatgaggaagtatctgatactgtagatgtagttttcagtccctttctaaaattaagtctctcttaatttaatatgtataatattatattattaaaggtaatataatataataatgtatctctttgcatcagtttggactgtggatcatctcatatttcccaaaccaatcaaaggaattcataagaaaaggccctccccccccactgtcttcctcatgtgtactcaagtctgagctttagactctgtgaaatagagataataataccttcccacatggatatgacaaggattaaacacgtgcaccaatggaaagctcctggccccataacaacacatagtatgtgtccaataatgttagcttgcagaccttcagccagccccctcctcttcactcccacccgtgagaaaagaacggaagggaaggaaactcaagttattttttttctgaaaagattgaatctttataaaagctcaactcagtccattgccaaaatggatagatattcaaaggtgcttaatcagcaccactatcatctccaccattttctaattaacataggtgcttgattaaaattcccagtaccccaagaagctatcccaggagggccaagtaattgccattgcaaaagatattacagtagtcattgatggtgggagaacaaaaaaataattgcatcataatggaaagtggccagcttcctgttcagagtacctgtgaaacatagagcattaggttcaatatatacagaaaaaaagggattaattgtgacaaagataaaccagtggtacaacctcaaattggggaaaagtgtccaggaactccttacataagtggcttaaacacagacaggcagaccaaggtgggagagaaaaaagcagaggaagacatttatagatcactctttaactctgtcattctctttaactgtaaaattactgctagatagatgcagttagggtaaaatttgccagtgtcaataggggtttttgtaaatttaatatttatgatctggtttaaagcattattatagctgtgtaacttcctacttcaaagaagagagaaataataaaaagactagtggggaaattaatgagttcaatgtgctgaattgagaacatatgaaatcaagcctcattctagaaaccaagggcaggagtgcataccacagacactgtttgtggttttacccaattattttaaaacccttggaaaatattgtagaatcagatgtctgctgaattcagacattgctaacagcatcctcccccacactctccagagtcttaagctatttatgcctgtacttggtgaccgttaccatgcagaactgtcttgatggaacaaataaaggaaacataatagcaagaagattgtatcatcctccccacagaagccaaccagccatagctcagtaagatgcaaagtctcattaaaatggtagcccctacagggcaggagaccccatctctcaaccagcacccataagagtcagcaccgcctgggagtatgagaaggtccttagtgggatgtcccaccgcccatcacaaccagggtacctcctcgagtcacaccgctgtagaccagctaaaggcttggggagtttcttgtgtaggaccctccgagcactgccaaccaagctgggagaaactttcggatgaaaacgtccatatcactaggtcctcaggtgtatttttctgactttgtgcctactttcagatcctgagtcttgttttgacccatgacgactgcctttctcctggagtctaaataacaccagaggcagtatcattcaatcataacaatagctaacagttggtggatgtgcaagaatgtcgggggctctcttctaaaaacatttatgcatagtaatatctattcttcacaactaggcgagacaggtcttcttattagcccaccttatcaatgagaaaacttaatatgtttttccatttgaatgaggcttagggagatcaggctaatgggcccaggctaatgggctaatgtggcacagtgccacattgcagacgtgggttccaagccaggtagtcggtctgtccccagagtgcaggggcttcattgctgtgctgggtagtgtagttctcaaagggcagtctctggaccattgcatcaaccagcatcacctagttcatgccccagccttactgaacgacagctgtaagggtggggtccagcagcctgattttgacatttcctccaggtgattgtgatgcaagctcaagtttgagaactgctgctgtgtaaatgtgctctgtgcccagcaatcttcttcatcagcattatgttacttaattctcatggaggtcctaataagtaggcattatttttattttagagacgaaggcatgaaaatcagggggcaggagaaggaatttgcccacaaatactaaacggcaaaggtgaaattcaaatccaagactttttgactccaaaatccatattgttaatgcatattgatttcctgcttgatgtctagcccactgcttcatcttgctctctgggacatgtctattctctggtttcatcccacctaccagcttggggcacccggtctttgggttatgcacattctcacagcattcttacaaatttacccgcacctgtgtcatcgcgctggactccaggctctgctgtgtgccaggtctctgcattccaccctccccagcaacctcaggcttcttccagtaggtctggagatgagcacctcagtggcaaaggacagagcccttgtgtggaggttggacttcttcctcactggcagctgagctcttccaactgagtcaacctttctctttcctctcttccacctggatggccgtggcgcacaggacggacacagcctccctctgacctgacttttgttttcctcatgttaaatgctatcactcactcaaataatgctgtgtcttgtgcattgattattattagaagattgttttataccttaacagctttagacatgaaaagaaattgccagactccagggtatgtgtgtcctttcttatctgagtctgttcagtttccccacctgtctttgtgggagttggcattcttcatcttcctagctgtgtaaaatgcttttctctccagaaccaggacagttgaaagggattgagcagagcatcatttcagttcctcaaggccccagtctgccacctggctctccaaataccatggcacagccgcagcctgccttttgcactagaacccggagtcctgaagatgtggccccttccctgggaggctcatcttgccccttattctacccaacagtggtgggttcttctctgcttactgccctcaccccccacgcaccccaccctgaaaaacaaacctcttttcctcctcctaatccagagttaaacaaaatgactttggactttacagttcttccataatagattcaggactccccctgtttaactgatttgcagcccgggaggcgtttcctcccctaattcctttcatcactgccttgccctttatggagtgctttgctgagttgactgtggttgaagatatctggccagttatctgcaagatagaaaaagacaaatggctttctccctcattgatttatttatttcgacacacaccagtccagaaaaggatttaagcagagaaaatggtatggattttgtccccaggaaaaccttttggtaaagcaattttgattaacttatttgttcagtaattgtttattgagcacctactgtgtgtggggcaactctctgaggtactagagacctatgagtgaacaaagcagaccaaagccctggcctctcagaacttgtatgctagtgggagggagagaaaatcaacacatggctgaggaagccctgtaatatgttatatggtaattgctttagggtaagaggcaaagagatgatcaggtgtgtgtttgagggattgtagacttaaatagagtggtagaatggattcattaagaagatacctcataaaaggcggactgacatttgcatagctcggcaggagtactcctggcagggttcacagtgactgcaaaggcatgatatcaggacccagccggcacgctcacagaacatcaacatagccacatggtgacagaacctatttaaaaccttccctgtctgcactagactctaagcttcatgagggcaggaagcatgcctatccttgctcactgctatgtgcaccaatgtttagcaccaatttgcctctcaaatcatacacattcaatacatatttgtttaaaaaataagtgaataaaataaacatgagtttatagtttgagtacttgagcaagcatgctggaaagacatgagtttcgagtcagaaatggcagtcccttaattagtgatttcaaagaatgacaagttcaggccaatggcgggggtagcttatggctaagacagaggggaaggcccatgagaagatgaggccaggtaggtgacagcgcaggtgtctgaggactcatcacaaggagcgttgcagtcaccccagataatggctgaggctagtgacaagttgggctgtgagccaagtgtcaaagccctcgatgaatcttgagggactcaggatatcagtcattggcagaaaagaagagagggcggagcaacattgccaggtggcaggagcttcagaccagcaggagcagggctattcaataaaagtgtgaaagagaaaaggtctccacttgaggaggatcctccactacgaggaggatcatagacccaacctctgcatgccaaaacagacaactcaacattttcttgagaaagctaccgaggaggcactcccctcaggaaacagctgggtttcaataaatgaaggcagttcagggagcactctgcctgaaggctgatggtctcggggagcatcttgcctatgttgtgggtgttccagagagcccagtggatgggtgtggaaggtgggggagagtgaaagattggccagaagggggaaattcttttctctaggggaatgaatgggctggagagcctgatgatgttaggggagcaggagcagatgcacatgcctgtatgcaccctggcaataagagatgaggtgtgttggtgttaatcccacatgttcccagtggaaggtggtgaaacctcacctcacagatttcagcttcaacctgtgtctgtggcagggcagaaaccccttttcttcctgcccctgaaggtacagcagtggcagtaagtgggtagctctccataggccaagtcttcctgtggtccagagtaagaagaccaatcttcaggaaggcagtaaaaggtcaagggcagaggtcatgagatagtgggagtggagaagagagggtagggcttagagatatgttgggggccaaactgccagaacctgatgcttggtccaatgtaggatgggagtgagggtggaggacaggctgggaaagacgaccaggtttctggtttggcctcccttattgcctattcgggagaactaggggttctctgtccagcttttctcctgtgtggcaataggtagggtattatggacttgctgatgtctgatttatttctgcctgctgatccatgtgggttagctctcttttctacaaaaatgatcataacaactccagactcattttttaagagaagagggatttatcagattgaacagaaatgatagaatacagcagatatatgataaataggcagaatgaatcatcttttattcaatagatatttattgagtagctaaagcacaacagtgtatacttaggtgctgcagattgcatggtgaattcagcctttgcctcatcgggctgcagtatgggagtgtaggcaatattcaataaataaatatgcaacccaatgccagggagaggtagtgccatggagaaaaattaaaaaaaaaaagacatgggtgaagaaagccaggaggagctgcttttgttagagagtgactttagtgctgcaagaaagccagctcagcacagagcctagagacccaagcgagatgagacagcaagggcttgtatgaagagagggtgttccaggcagaggtaactgcaaatccaaggccatgagtggggaatgcatttggtgcgtatgaagaacagcaagaattctggtgctcagggaagtgatgtaggatgctgtgatgagagcccctatagtcagttcatgcatgaacctgaaaaccatgtgcaaaactgtgggacttgttctaataaaaatacaccagcacattttaagcaggagagcaaaataatttaataaatgtttccttttttaccttttttatttaaatttattttttattgtactttaagttctgggatacgtgtgcagaaagtgcaggtttgttacataggtatacatgtgccatggtggtttgctgaacccatcaacccatcatgtacattaggtatttcttataatggtatccctcctctagccccccaaccccctgacaggccctggtgtgtgatgttcccctccctatgtccatgtgttctcattgttcagctcccacttatgagtgagaacatgtggcgtttggttttctgttcttgtgtttgtttgctgagaatgatggtttccagcttcatccatgtccctacaaaggacatgaactcatcctttttatggctgcatagtattccatggtatatatgtaccacattttctttatccagtctatcattgatggacatttgggttggttccaagtctttgctattgtgaacagttccgtaataaacatacaagtgcatgtgtctttatagtagaatgatttataatcctttgagcatatacccagtaatgggattgctgggtcaaatggtatttctggttctagatcctttaggaattgccacactgtcttgcacaatggttgaactaatttacactcccaccaacagtgtaaatgttcctatttctccacatcctctctagcatctgttgtttcctgactttttaatgattgccattctgactggtgtgaggtggtatctcattgtggttttgatttgcatttctgtaatgaccagtgatgatgaggtttttttcatatgtttattggctgtataaatgtcttcttttgagaagtgtctgttcatatccttcgcccactttttgatggggttgtttttttcttgtaaattggtttaagttctttgtagattctggatattagtccttaaagaattactttaaccatgaagagaaagatggaggggagggggcgtaaagatagccagtaaaggcataaaggtatgccagttagaatactgttgatttcgtccatcaagaattgatgacgtcatggactgcagtggtaggatttgcaatctaagagtatgttaatctggaatatattctgaaactaagctagaaagttcattgattgattagatgaagtttgtgagaaagagctcagtattaagactgactataagatttgtggcctgggctgctggtgtataccatgctggtaatatactattcttgtccatcaaaaactccaagaaaagcatgcttgtggtaggaaagactttggtcctttagatatacaaatgaaaatgttgagtagatagttgactatgccagggagctagaaaaatgcatatgggaatcctaaccatacaggtggtgtttagagccagaggctggctatcccacatgcagcgtgaaggcagacaacagctttgtaggccaggaacagtggcactccaatagtccagtgtcaggaaaaggatgatccagcaaagacaattgggagatgagaaggaaatctcaaaaccagttcaaggagaatgtttcataaagagcaggtgtgattacagcacaagtgttgcttagaagtccagggagatgaggattaagatttggcaaaatgcacttatacacatgagacattggaaagaagggttctgatgaagacggtagataaaagattaattagaaagagggagaatgggttaaagaagttgagatagtaattaattttgctgagaagtttcactacaaagggaagcagaatatggagggtcagtggttggaggagagtgtgagttcaggattttttcctctaaagtccaatctgcagcctaatatcccttggtcctttactggctattattgcggtgtaattacttgtctcggtgttctctgttgttcctcctcctcaaataaaataggggaaagagttagccaagattggcctctgctttttgagcaatctatacattttgatcttcagccaaatgacctcaaaatttttatgtgtggcttttgggtgctctgggaatttggaacaaaagtcactatgttgctaaagcaattgactgtggctgacactaggtgctttgtctggaagtgagactatctgctgccagccctaatgaggattccactggggattgatagttgtggcacttacgggaaaaattgcttggagtgggaaccagcttataagaaggggcaggggacacagaacgatttctgctcatccccagtccctccccaaggaccaaggcagaagttctcaaagtcctcaatatttaaccctgcatgaccagatgctcacctgaagcaggggcgtatgaatgtatcttttttcaaaaaagatgccacagcaggaatcaagttaggcttttgaagccacccctctggcccacacacaagaagtcccctccttgtccaggagaagctctgaagggagtggaagtgcaggggcaacccaacgccacagaaatgtggacaaacactgcccaagtcgtatcctcaggggagtagggctctggggaaaatacctctgctctacgtaggtccatgccctgggaattctgtgaacatccctgctgcctcagtgctgtgaattctacatcaagggggcagaggaagcaggcagcctcagtgtttaggtttcaataatgttagggatgagggagagctcaccaacctggaaaacgtacctgccgccataccttgcccatctaatcttggcttccaggtgacttcctgggtattcatccaaaatgctcctcttcagagtcctaacaaacctattctcattgccaccattgccctagaggcactcctttcttggagagggaaagccagttgattgatagaacattgtataagatggggaataggagagaatagcttccatccctctctgtacccaccttctccccagaactcatggctcttgagaaattagagcaaattagtgagtgaccacagtgttttcctccacatcattctgctgtctttagttttgcttccagctgcccacactgaccagcccctgtgctgcttctgagcggtcacgttcctccgtgtgctgacatgtcttctctctgcatcaccagtttcctagacctcttggtttgggtcactcaggtgttgtcatggcaatgacatcctcagtagagtagcactgctcatgttgtcatggttatcaggacctcttgatgggagccccactgcactgttgtcatgcggagagcaggaaggaaccctaggaccttctggtaagcctggattcttaggctaggcatgagtcatctgtgcctgaaaatgaaggtggttatgattagggaaatagcagctgcctaaaatggtgagattctaactacttgagaaacgaataactgaaagagggatcatcatcctcatcaccgtgatcacctccttcccacctcctcttcatcctctgcatagtgtctgatatttttacggtagcttggctatgttccaggcactcttctaagtgttttccatttgagaactcctcatttttcttgacggccttatgatgtaggtgttcttgctgttcttttgcagatgagggaactgaggcgcagagcacgcacttagaccgcttgctcacaggtgctccctaacgtgcaatatggccaagacttaaccaggcaacctggttccagaggtttcactccgaactcattacctattctgtttcaatactaacaagaaaattcaagatgaatcaatctagttactgaaggcgttactaaattatatcaccttctttttggctagaatccatatagtttatattttttactacttttaagttttaaaatattttcatatgttcatttgattccaacaactgtctgcagttagtatgtctattaacggtattttacagaaaagaagatcaaagttttgagagttcataattccccaaggaaagttgacgtctaaactgtgttggacgaggtctgaattcatgacaatctgtagattcagaagctagtgttttgtcttgttctactgcatatcatgtcatgttatatggcccagagcctggctctggggaggaaagtggttcaaccatctaagataaatgggtagcagcagtcacctctatggatagaaggaccacatggcaagtcttggcatgttcactcaaggagccattcaccctcttttgccctcattattctatgcctaaaaattccactgtacagtagctactttatctattgccatataggcaagagagcagcaaccttccttccatggcaactgccgtcatagaatctgggctgccttgagcaagtcatttaacctgtacatgagaatcccaacagaaggttaattggctctgtctctaatataaatgacaattaaacacaaataagttacttagtagctggcctgtgagaaagtacagcttttaagagagaggaagctgagccctgagagtcgatgtatcttctcatttgagtacaaagggattgattggagggggacatgctgagtggggaacagcaaagctaataaagacgattataaacagtagcagcaaagacttctcattttttaaagtatctgacagaactttacctatatcagcatgtttatctttagagcagcactgtgaagtaggtaataatgtcatattattatctatattcaaaaaatagggaaagtgaggtgcagaaatgttagttaacttgctggaggtcaagtcagaggtggagatgggacctgcacccagcctcctggatgtgtctggcggcatcagcagctgtcttttctgcatttgaactgggtttcaggacctgggcctggagcttaatcaggggcataacgatgaacctcaacgctccctttctgctcaccactctccaagcagccgcgccttgcgcactttgcccaccctctctgagccttcgccatctcctctgtcaagttaagaccgtgataggatgtatattcctagcttgttgtaaggattatatgaggtaactcatgtaaatgcatgccggggcctgatataaaacaaatgctcaggattggtgtggtggcgcacacctgtaatcccagcacaataggagactgagggaggaggctcacaagcccaggagttcgagaccagcctaggcaacataatgagacccccatctctacaaaaaaattttttaatcagctgggtgtggtgatgcgcacctgcagtcgcagctgaggcagaaggatcacttgaggccagggggtcgaggctgcagtgagctatgaacacactactgcactccagcctgtgtgatagagtgacaccttgtctctcataataattgtaataataatgctcaataagtgtcagagtggtgacatcacaggtggtacacagagtgagcattagaattggtagttattcctgtcctcagcaaatgtgtcttcttaatcttaaagatgaacatactgtttatagcacagagtaaagtgccggatgtggcaagctaagatgcaaatgtccatcttcaagaccttttcacaatactccattttctctaatgcagagtttggcctatactattctcagatgacctgttggtacaagggctaccattttcttttggcagtgtttccaagtctccatgtcccctcaagtgaaatccataatgtcttctaagtttccagtggatttcaaagcctcataattaacgtccatttaatagcgatagcgaatgactgcttgttgctttcttaacatcctttcttttacaggtaaaagggtaaatttacaattagcagcctccaatttgcatagacacagaagttttattaagggagcaaaaagtgattgaaatttaactgaaagtaatactatgatctaggttttaataaaccaaaacaaatggatacattcttatttctattctaaaagggcattttattcaaaatgtgatggtccagtcttgaactgtgatatgtttttcgtcattgctgggtaagcaacttcctagccacattacacaaagtgaatttagctatgagctgtgagctatgagctggataccagtctgcccagtgacgagcctccttcattcctacttccataagaaagtaacttgggaatagtcagtgctgtccacaggccttgataatatcaagatgctgctggcctcatttgatattaaacatcagctctgacgctgttttcatgcacttttcaaatgaaagttctccccctgcctagctaatggatagggcagtgcagtgggaggagacccgtctgctgtcctccctaggcgatgtagctgccaagtgggtggaaggcagagcaagagagccaggaggttcacagcagtgtctctttccagatccaagggagacacaaaagggaattaaaaacttcacgttgcgttgttgtcactctacctgcgtctcgcctgggagagctctgcagctggagagtgctgagaagtcagcccttcagagcaattacaattcatattgactataaacttcccactgtgcgaggaaaggaaaggaggtgcttgccaagcgctcagaggggcgagtgtaaattatttcaccatctgatgatatataccacgttggcaaacattaggggaaaagaggaggagagaaagcaaagagtgtggggaagctgacaactgatctcccgcattcatgaaaggaactgggacccgggcacactgctgggacaggacgagtcgcccacctgtcgctgctgcagctggcttgtctatggtctacacttgggtgaggaaagcttttaacctgatgtcccagctcacacataactagaggagagggcagggaatacggggaagtgaagagcactttggtcagaacacttggtttgcctctttgctctgccagttactaagtgggtgactcttaacaaaccaattaacttctctgaacctttgttacctcatctgtaaaataggatcagaatatgaagattagcaacagtacattggaggtgctttgtaaacatgaacacattacgcacattatcctttattaaaagttttgtattaattatgcatattcttttgggcagtgccaagaaaataaaaaaggcagacaggagaggtgtaaacccaccacagagcaatcttctaagataaaggtgtttttacatttttgcaacacaaactcaaaaagcaaaaaacgtaagcggcgtttatgaccgttgttataacaacagcaattatcatttgttctcattatcgtttgctaactcctgcatttatttacacagcacaattaatctgaaagttcacctaaccatttcacaaatgctgtggtggaagggagtctaaggaaatgaagagagttgaacgttaggacacagctgggcagtgcaggaatcaaaaggtaaatcactgggcaaaaggaacaacgggattgataccagttttagaatggggccagacaggcacggggactcacgcctgtaatcccagcactttgggaggccaaggcaggcagatcacttgaggtcaggagttcaagaccacctggccaacatggtgaaaccctgtctctactaaaaatgcaaaataaaattagccaggtatggtggtacacacctgtaattctagctacttgggaggctgagggaggagaatcagttgaacctgggaggcagaggttgtggtgagccaagaccgcgccactgcactacagccaggatgaaaaatatctcaaagccagtgttgactcttattgtctcatttcatgtcactagggatcagcagattaaggcaggtaggtttacgaatagcttgtgggctcacaatgaatttcatatttttaagtggttgaaaaaattaaagaagaatcatatttcatgacttgtgcaaattatttgaaattaaagtgtcattgtctctaaataaagttttatcagaacacagccatgcccatttgtttatgcctgcttttgtcttacgatgtcagagtggagtagttgcaactagattgtaggtataggttggcaaagcctgagatatttattatctggtcctttagagaagtctgccaatccctgcactgcatgaacatggactcctgaaggttctgaacactgttattaaaattcttatttttctccatactccctttttgttgcctttcctcagcactctgtgaagttgcaatgaggatagttctcacatccattccaaatgatgcccacttctctgtcttccaagagtggcccctgccaccctccaggggtcctccctggcttgtagatgttgtgctccagtcgacagctatggctcaccttattttcaacctcagctacaacaagacactttcttgcctcgtccctgactagtcatctctgcctccatcttcattatgcaaacaattctatatcctgcccactttggcttttttggagtcattcttaactggggttaacaaaaatctgattcttgccctggatctttggttatgctcactggtctgcagttggttctggttctatctatggggaagtttgtttttggatagtggcactggttgctttgtttctgtagcatacagcattctgtggcagcatctgagtcggtcttcgctagtactgccttagagagggccatcatcttcccaggaggagcacatttgcctcaatcagcaccttcaaccaaaacatatcattgcatactccttatctctgctggtttcaaacccatattttaccatcaccaactcttcttcctgcctcttcaccctctctccctgttttctgtctggaatctctctgtagcaaaagtttatttgtgaagcagaggtggcatgccttaagttgaccagaagaccatggtcaaatgagccctactcaatttactacatttcttttgaattccttaggtatctcctcaggacctctcagaatcccgtaattacgatttcataatttcaaaaacactttacacgttataataataatgatttcaacaagaagagaaagggaccactttgtcatagagatttcttttctattgagatggactttgaaatcttgtcactttcaaaagtgaatctcaatttttacatcaaaaaattactagttattgttaactgtttgaagtatgtgtcatttatattcttctacataactttgttacttttgaaaatgtgtaatatgtgtttgtgtcaatcttgtagtcataaactgagcctttagaaatagattttcaacgttagattccagtaagatatgtttagctgaaacagatattgaattaaatcaggacgggcctttggtgaaccagcaggcaacatgcctgcctgtattaatgtggttctcccctttgctgtgatgcagagcgctccatatgatctgaagactctgttgtagcagcagtctgactcatgacattccctagttgtcaatgggatgaattctggaatgaagcccagattctaaagtcaacccacatgggttttctaatgcagggggagtcatctctgcttccatcttcattaaataccattagaatcatcttccgacccctcaaggagatgagaaatgttggagcctccaatgatgcatcaataggaagcaaggtgggttatcaaacccccatcaggctttaagtgttcactgtgtgtgggtgtgggtgtgtgtgcatgtgtgtgagcgtgtatgcatgtgtgtgtccagtcatcacgcatctccagcctccagaacgttcttcctcttgtgttgtaaactggattgaaaggtggtcacatttcagaattagcagatgcctagaatgtagtacttttggtagcactgaaataggagaaacaaaactataaaaaggaagttctatttctttcctacttttctttttcttcctctccctatgtagcactaactcatttgccctgcaaaagtcccttgggctttttatcaattagctgaggtaatgcaggctgagccacatggggctcagagaccaccctgccataagcatcgacatctgacagggtggattttccaagataattccacacaattctatatgggcctgtttattatcccattattagtgtttttaaaagtgaaccccctgggaaaattttcaactgattaatattcacctctggcatatgcagtctatttgaacaatgtggtgtttttgacaattatcagaactacttagtatacccccaggaagtagtcagtgatctgccattgctgtgaccctttttggaatacatgtcatcaaaatgccttcgatttggtttaaaaagtcagccctcaattttttgacaggcacacacacagacacacacacacacacacacacacacacaacaaaattgtataactcgcttaattcatgatagtttgagccaaatggctgtttgcaaaataaagcctatgcttgaaaatgatttcgttgtcattgaaggcatgacaaagtatcattagccaacttttctggagcatttattctttaccaagcctgagtgaagtgctctacatctgtgatcacatttaatcttcataatgaggtaagtaccattgtaatcttcattttacagataagaacattgaagctcagagaggtttggtgatttttccaaagttatatagtaataacttttgtggcaattttttagtagctcatatcgtatctatagaaactaattttacttagaaggaaaacagcactggggaaagataatagacttggaatcaaacagacctgtgtttccatctgcttcacatttgtcagccgcttctccaattgtaacttgggaggaatatacacctctaaaagtgggacggcataactattccacatccactgtaggcataatggagcactcatccacagcagccatgattactagtgttattaggatgagaagatggggagagccttacctatacttgaatcgacagggatggacagagcaatgaaaaggttttgaatcaaaatcagaggcagggaaaccatagcactgctgtagaaaggcagagcaagccagactgaagcagtgggctgtgctagtgctcagaagtgtccgagaattctttgcgccactctcacccgtggcagtctaatctcccggcatggagaatggctggccttactgactccctccgaaagaatggagtgaggtggaaggaaggctgtgtgatgtcgaaggccaggttaccgaaggccacacagcttctgctggtttttcctggggacaccacatggcgagaccttcaagagaggggagaccaggggcccagatccccgggcccagctgtcagagtctggaagtgcagcagccctagagaggaccccagtcctccacgatctggccagaaacctcatggaagaccctgatgagatctgctggttgagctcattccaccccggattcatgagcagaaaactaagatggccattgctggtgtaagcccctgttttggagccatttgctcctcagcagtaaacgtccggaacatgggtccatcatcctgaagaaatgccagatgctaacttagatgtcctgttgtcctttgctcctcacgtcaccttctctgtccctctgcacttgcttcctttggtcaagacaaggtggacttacgctctcggctccacgagggcctttccagtgccctcagtttgcgatctgacctcagggtttttctttgggatctcggtacgtcacagtgatcccagagtttctgtcagattcaggtagctctagaatcacagagtcctgaaattttgtcttgataattagctctttactctctcagcctttgggccactgaccccatccaaatggcggaaagtgaaagaagccggtcccgtgaagaggtctacgttttcagcccgtttgtggacattctcactgcctgacaaagccgcactcagtctcagcatctcaggctgagggctacactgtggagacggaggtggggtgcgtcccaatgctagtccctctctctggaacccacaggcagaggcctcaagccaactgtcctcccctgtaaatcagaagcagggcaagtaaaagcttggatgtcttcgtctctccgtagccagaggaaatctgggcgcgcagagagatttggagtttcatcctccccgctcagccagtcccaggcctcggctccgaggaaattcgctgaaccctttcaataggcttgaattctgtcggcagcccaaccatccccttgtttactgttgaaataattactactttgccataatattagctctgagccgtgactccattaccattatcaccggaatattacccatttattatctcccagcaaccctggaagatgaatactgggcttcagagaccaattgttttacagcagacaggatcttggtgtgcattgtttaatgaggtaaactacattacagccagcattaatttggctgcagtgcactccactaaatcactcttaacctggaaatctgccactctttttgatatacccttaatcggcgaggatgggagacatcctttgagaagaggctggagctgaggggagaggagaggaaaggttacaggtgagcgagccccgcccagagatgtgtgcataagatgggggaggattgtggagtgagggaccaagggaggcaggagaaggaagcaggcagagggcacgcatcctctgttctgctggtcccaaacgcctgggaagaggcaaaggtgatatgatggctgaaaataatccacatgcctcccctctctaagctcaggagttatgaatccacagaatccattttctgaccacatttggcttttctcttctgtttggcatcttcagaatcaccacagcaacccacaatagacagaagacagaactagacaatgagattgtcttttggcatgaggttgtctttcggtatgagaggcagggcagcctcccagagctctggccatttgctgagctcatagcagcctgcgtgtggactcgcggagctcattgccttaggtgaaacgcagctggagacacaccaagaaacagaggagcagatgaaagaagtttctgcataaagcctcccttgtcacttacattcttgctgtaagctgcataaagtcacctgaggactttgttaaagtgcagattctaattcagcaggtctggggtagggctgaaaagtcttcatctctaagtggctcccaggggatgctgatgttgcaggtccacagcaaaaggagccttgtttctctaagaaatgtctgcactgccttgttcaagatcatgctccatgcagtctaataaaacagcagcatagctaccatttttgaggtgggcaaacagaaatgaattccttttgctccatcaaatgctgacaacatctatacaggtcctggggtgaatgaagcacaaaaacttctcagaaagaatatcccagatacaatagacaccagagacactgccgtaagtcggtgacttcagatttttagggcagagaacattgtagtcctaaaatgtcgtaagaaattacttttatattaccaattgagaaagaatcgaaagggcttgaacttcggactcttggaatccaatctaatgtttttctgtaaagagaaataaatacattttctgctatgccactggtgagtttcccaaaattatctgttttcctgatgttgaaaaccttttctctgcacagcctaaatgaatttaaaacttaagcaatcatcccataaacctagcccaggtaatagtggttgaaattttaaaaatggtttattagaaaattccagggtttcttctttaaaaactaaggtggggctgttatgtttctcaaagcctctctcagtttaccatgttcatctgcccaagcaccaccatcattgcattttactgagagagacagaaaaaaagtctttgtgatttaatatgtaatctcaagaatagcagaacttggccaacggtataaattgggaatgtcttttactgtacatcttccctcccaaacctttttattgtacccatcttgaaaacttataatgaatagtttttatctccggccatacatatgaagtgtgaggggtgtgtgtgcatgtctgtatgtgtgatgtgtttcatcctctataagagtagcataacaataataattcttcttttcaaattttatcacaattaaaggaaaaggacatcactaatttattttcatattgtctaccaaactgttccactagtgtttggattacatttatctggtttgggagcattatgcctctcctagttcatttatccatccattcatccatccaaccacccatccatccatccatccatcatccatccatccattcatccatccaaccacccatccatccattcatccatcatccgtccatccctccatccctccatccgtccatccatccatccatccatccatccacaaacatttgcttagcatctgctaggttctggtaaagctggaaaaacaagtaaaaattagaaaagtaaaaacaaatgagacatgatttctgtctttggggatttcataatttatcatgagagacaaatataaataactttttgtgataccatttggtggtgcattttagtccttctcttttttcctcaactctgtaagcagttttctttgtagagataatgtctaattctttttattgaaccatagataaaagacagagtggaatctagcagaaagctcagagtataaactgggtctaattttgaaatggtgattctaacagtcttcttgggtgagtctccaatacaactacaactccagttctttcttgtagcgtctccaattttaaaactgggcattactaacttgactcttccatctcaagaatgtttttacatattccaatgagggattgtcctgttccaaacatgggtggaaccctcagcttagctctagagagcagctgttcgctggagactacgcatttgccagaaaaatgccatcctgttgaagatactttgccactggctttttcaagcacccaaaaatggaagactgcactgaaggaaatttgttcgaaagaacttgagagattagggggtgaaattagatagagaaaaaaattctaaacacgttgagatatgtcgtcagtaaaatgcgctttggcataacaaagttgtgaattgaaacagttacagaaatattgtggctggggaaatcccaagtgtttctacagttgaacatccctgattagaaaatccaaaatcagaaatgttccaaaatccaaaactttttaagcactgacatgatatcacaaatggaaaattccacacctgacttcatgtgagaggtcacagtcaaaacgcagccaaaactttgtttcacacaaaaaatatttaaaatactgtctaaaattacctttaggctatgtgtataaagtatatatgaaacataagtgaattttatgtttagacttgggacccgtccccaagatatcccattatgtatacacagatattccagtatttcaaaaaatccaaaatctgaaacacttctggtccaaagcatttcacataagggatactcaacctgtattagaaaaattaagaaatttgccttctgtaaactttaatatatgtatttcatatataacaaatttatatataatgttttttccttttggcatataaagcctattttatttggttgataatcatgtgattggtgctctgaggccaatttaaccgtttttactgaatagttaccatgtgttggatgaaatgctatacaattaactgtaatattatttagtcctcatcccccccagcaatacaattcagtgacgtctagttacatgagccaaatcaactaatgggatattttcactgttgagcagggacatacaatcagagtaattcaaagtcgtaaacacaaacagcacccttttggtaactggctctgtccaggcatgctcacctcttgccatgacctcttgcatgtgtctctgtaaaatgaagctgataatgaattgttccgtactcctaatactaaaaatatctgtgatatagatgtaaaacttctggggtctttcttaaaagctatcgtgaaagtgcacaattattttgcatgtttgtatacaagcctcatatccacaagtgcacttggatgcaccctccagtcctgctccctgatttatagtacattcatcaagcccaattgcccatacacagtacaattctctgttaagaagcagcatttgggaggaaaatgtaaactagcctttgttgtgatggtcgcagtatgtgtgtgctgtgttttctctccctctgaggcaaattactgtgagtaaaacctatattatgctatcagatgcaatcccagcctttgctcaattgtactttgcaatggcacaatagattgtggttgtttgatgccatctcattcggttatttttctcacgtttgtttgtctctcagctaatcggaagaattcaagagccttcagtaggcctctcagtccttagcctcagatcaactagtggagccttccccatcctgggtaaccctctggaagtcaagctgtcttgatttgcattatcatctttctttatccgctctccagagagtccccatcttaacaattaaagtacacacaagaaaatgactgaggatttccttttggctttcctggaaatggaggatcaagctgagtaaattctccaagcttctcaatttgtgaagaaaaaatgttacatttaggggaaaaaaggggggctcctgcttagttaaaaaaatggtgggtggggacagagtgcaagagggagaaagaaagaatagcaaagaaagaagaggtgtcatttgggcgtctcgctagtttttcttctatcctggttatcaaaagagcaaagaaattctacttccctttcccctccctcaggtgcccttaggcctgcgcagcctgggctgggtttgcaccgctttcacacggcccgagtagccaccctgtttgaaagtaaagcaagagcagccacaaagtgtctgagattcatgagatcactccacaaattaaaaccttttatcagcctctaagagctgtgcaaactaattagactttggccgaactttgccaatgactccctcgaggtattattataaaattttgagcttggaaacgcgtccccattctgtcaacatcaggttgtttcagctacagaaatcgagctccagctcattttagcttccatgatgtgctttgcataatctgtggcattttgcactggtgtggcagggaggagagtagcacagctgtatttgaaaacacataaggatgtttcccagcaataagacttcagacacagggactgaatttcaagaaaaacccatttttgcccctcaattttaagaagacgctgcagagttcttagcttaagctataaaggtgagtactcaacatccaggtctaacagcttctaatttagggaggacatatcacttcccttctcaatgtttttggctcttcatatgcaaatgaagagctcttactaacaaattactgctcaaatctttgatcatgttttgaagcaaagtctgagagaggaggctttctggaagagcttggtaagaagtcagtaaactttgatttgtctcagagaatttaggttcataaatagcaagggtgcaaactccatgtgactcaacaaatatttgaatttgtcattcaaaaaatatcaaacatatataggctatttcgcattattgggggtacgtcgaggcattgacagtgccatgtatgccagtggagccgttcctactcttgctctgaataattctctgtggggctggcctgggagtgcagaatccctctgcagcagatgtggccttctgcacgctcagagccccaggacacagtggacattgaaggggaacagagaagtagagggtttccctcatccttagcccatgcctggagcagggggccaggaaatgagaggtggtatttgtttcctttgctgaaaatggagtgaggtgaccttccgatgtacccaagcaccttatgacagtgtgtttttaccacttcccagaactgaccatctgcccaacttttggaccaatcctgggccactggtggagccaggaagcctggagggtcatggaaggggagactcttgcccagtagtccacaagagggctatgcagctggcatattggcccacagaacccccagccctgcagcatggccctgagccctcacaggcccagagcagaggcaggagtggaggctgccagggtttagaccctccttcactaaagggtccccaggttcatttttgtctccgccgtctgccatcccgtctcatgggctctcatgatgggctcatcaggttcttgaattctttccagttgtcactaattacactgcagatccgtaaatcattccaggctggggctgacagggagagacgggccctctgccatcctgagctcggggcttcctgccacacctgcagccagtgaccctaaggcagccgctgatcagtgctcagtgtagaagggagggatggccagtccctcagtcacccatccccaggctctagccctggctgtggccacatatgtgtgctcatcctggaactaggtctcaggtaatgcaacccctggaagaatgcagctactgtctctgcctatgggtttttattgctgtttgaatattaaagacagctgcgaggaaaggtgagcttatttcatctggagtttgataaagttgagacagcactcctcaaacttagtttaataacgcaacagactgattcatcaattctgggattgggtctaccaatcttcattttaaatgtgtaccccaggtgattcttgggtggtgattcagtaccccactttaagaactactgtacactaacttacactttatctctctctggctctaggctatcattgaccctcttgtttctggatcaggtgagaaccttctcttttcaaccttgctattctaatagggacacacatgtcttctgatcaaaaccacactagcttctctgtacataggagctattcacaacgcaggtgcacaggcccctatgcctgtcactgagagaaagcctgtgacctctgggtgttctgcagccagtgtggtgggccgagagggagcccccagttcccccagcccaccggctcactgcacagattgctggctaatggggcggagctagctgaagtgccttctattaatggagcagaatataaacagaataaagccttcatttcccaggctgtggtttcattattaatatacttcacaggttgtacgtttgcgcccgtgttttctcagctggtgtaatctgcggctctgagtgagaacagtcataaaattttcatttccagttgaatgtgcgtccaattcgccgtgaaatgttctatctgtcgtgaatattaagtgcactgaagcaatggctgctggattaggcagagaggttccccggcccctgccaggcctggcagaggacagaggtttgccggggcatgggtggaactttaacagggaagctgcaccgtgtgaagtctgttttcttgtggccgcctcctggagctttggtggaagagaaggaacctactgtccaggcgggggagaggtcagaaataatggagactgtgcacctcagggccaataaaaagcattcagacgggaggtgaaagggcacaggaagttcaagtgcagagtagagaagtggagggccaggtaatgccaggacagaggtgaggagggaggggattgcagaggagagagcaggcctgaggggagcgtgcaccggggaggctggttgtcaggcataatattagaaagagcaagcggagcattttatgcacggtgcctttttagatacatcaattaagcgctgaggagagagcacgatggaggaggtgcagggaaaggctgggagtgacagcaattaggagagcctttctgtacgacggcctgcagtcctggtgcggggcagagcgtcacggggactctgtcctaagaacaaatgtttcccactgccagctggcctgcagtggatgttatttgcctcccagcactgacttagtatcccttcccctcatgccactactcggctcagccatgccagctggctcttccctccaaacccttcctctcctctttcttaggagttgcagcattgtgccagtttcagggttgaaactcctcggttgctcccacagtgtgcagagagactcggggagccaaggccagtaggagtagaaagcccgcaggatttgatcttctctactcatcccagctgccgcgtcaggatcttttctccccgggcggccacgtgcccctgtcctataggggtttgatgagagagctgccccgggctagaggagaatgagaggcaaataggaagactgagtagagaaagtggagtctccttgccttgggcccacagcctccttagcagcactgagcggaactggctgtgccctgcaggagaatcccaggaagacacccgctttgttttcccagaactaaagtgctgattcaggcaaaggggcctttgccgcacctcccgcacaggtgggactcctccaagcctgcccggtggcccacggagggtgtgaatgcctgtgcgcgtgcgtgtgtgtctccaccgacacaatcgcacagtgaaagtcaaacagttcgttctatatctcttggctttttacagttaaagctcccaacagcccagtgaaacagcaatggtgattttcctcctttacaggtaaggagcaccgcacggccacagattaagtgattctgccgaggtcacagagctgaactcccagtggaggcagaacaaaacccttttattccaatctggagccatgtgcactctccccctcctccaattattgatagttgactccctctctggtttccaattgttttgctttggataatattcaaataattttgtgtttctgaaacgcacacctgcggtgaggagtgagttgagaggaagaagctgaaaaatgagctgagctgagatattaaagtggtagaagaagaataacttaccaagtgacatcctaaacacatgtagttatagctcgggaaggcatcgtctgtttcgtatgtcggccgtcctttcacacgccagtcacataccgactcaccttcattgtgagcagaagccttgagaacaaagctcagcatccagcatgatgcctacagcaggcaagagcccggccaccctctctagccccaggctcattccctgcccttgctccccactgtcctgcgtcttcccagggtggactccagacatttaagctttgcagatactgttccctctgctgagaaaaccactccatcctcctcccctccccaaacctggtgcccaccctcacatccttccagaggcagcagacaggctgcctctttgggaaaccttcctgggcaccagttttcacccccaagtgtggcccctcctcctgggctccccatgaacttgacatgcacacatctcaggctcatcattgatcgccctgtggtttgccatctgcgtgtatgtccagctcacagaagagacagggaggttgtcagagaccctagaacatccatccttggacacatactcagggcctgggcattggaattatacaaatttgggttttaagcccaatgttgccgcttagttgctatgaggctcctgatgaatcacaaaaccggcttaggcctctgtttttacatcgcaaaaatggggatcataacttcctcagaggcaggttgtaagcaagcaatcagtgaggaaatatatacgtgctatagaaaacttagatacttttgcttcccttctctttaatagatgtctcttctttccaataaatgtttactgggtgaataaatgaataagaaaaaaacatataatgaagtgcaaaattgtttggttcagactcaaactatactggagattcagaaggaaaatatcatcaaaaggaagtatggccagggtcttcaagcaggaggtgggccatggagggatcctggattcggggataagaaccctttaaagttggatctaggagaccaccctctgcacattctcataccttcctcctttcctttccttttggatttcccttcttttctctgtctctttctctatccctgtctcttttctactctctgatttctttcacttgttggacctgaacacttagtagacacttgctacctcattttaccccctgtgtatctctaatcttaaatctgaactagttaacccctgagaaaggtcatttccagctcttaaatccttggattttccaagagcctcaccttctctccacaggccctagagagagcacctgaaatgccattaaatggtcacagcccacagcatccaaacatgggagaaaatggagaaattaggagaaagtgctcccaaaatgttcttgtctgatgaatctttaattctaccccttgtgactcagaactcctgcccttaaactgcattcagaatgcatttcgccagtgtcccattctcagggagggagagacaggggaaaaaactgctcatccttctcctggcttgtcactgtagagttgagataataatagtctttttctgatcccctgaactttcccatctgcttcataaaacaatggcaatttttttcccttgctctgtcttcctctctctcttttatttttatcctcctacactataatttaaaactgtggcagtgctatagcccttgaggttttttttttctctttcttctccccttgctttaatacatgactgttatttaaaatggcctttcatctgagcaccaggaggctgcctgagcaagctgcctcctgcttttagagagggagggtagggccagtgtggtccctggtctcacctagcacctagttctcttcagtactgccatgcaaatcagaagtgttgtttgttctttctgaaagaagacatcggaagccaaggtctggaagtgcccctccctcagaaatggacgtcatatcaagctggtggctgtcagtggtccaccacgcatcaggtctaaataaagcaatttcagctgaaggcagtaaattcagtgtgcccattgatgccaggagggaaacatgtatcagccactcagcatggagactcagccgttgctatgcaggcttttgctcagctgcactgccaatcaccattcagatgcatctctcctcagctggatgggcactgcataggaaagggtggtggtcagggacttctttcccgggggaaatgtcatctgttttggggatcagaaaggaaggtgtcggacactggtgtttcccataccaactctgcagccttccctgccatggatgctcgttcagctgctgctttggagcactggctggaacatgctccacacacttcctgtctctgtgacagttcagttccatgactgcacctgtacctctgaaagtgattttggccttgtcttttctctccaagctctctccagagccccctctgaactggcatcagcaaagcaatcatattctaaatgagcttcatgaagaatatgccattgcagtaaaacaccagagacaggataaggctgaaggctagaaaataaatcgtgtgtgtgtgatgagagggtgtgtgtgtatgtgtgtgtgagggtaaggtgtgttccagccctcatgaacgtggtgatcacttccttcttgaattaagcagccctcctgtcagctggagaaagaactccctggagaaggcagggaccgcctatccccagctgatctgctgaggaggccacccacctgcaggagatggacaacattttaatcctggctacgtgggttgtttccttgtgtgatgcccagaaggactggcggcaggaggaaattcctggagaaattgtctcttgagtcaggttgttggatttcaaatcctaggtgtcattgcttcagtccctccttctccttagaatcctcctttcctttaaacactggaaatgattcttaaaaccatgtacaactattaaggtgagaaaggctgagaagtcaggatccaggattttctcctgaatgtgatctctcaccctgatgtggtgaaggtcatggcctccagccaggcactttctctcggttttctcttcaactcattaaaggaccattttaatcaatgtttttaccttccccccgataatccaaggatgtccaaataattttaattttctctctcttggcccaacttcattgccattgctggtatatagcttaattaacaatctattttaagatattgttttaaatgattttcacttatcaccaatttatcaccttctttctgtttatttcttcctgcatcttagaccttacatctgggattattttccttctgccttaatcctctttcgaatttcctctgggagagctctgctgctagtggcatattttctcagtttttgtttagtgaaaatgtcttattttgtcctgattcctgaacggtacttattctgatacagaatgttaagttggaagtcattttctttcagtttcctaaggaacatttggctctcagttctgctgttgagaagtcagctgtcaatcttatttttatttccatgaacgttttctgcctttctgcccaacctccaacaacccctgttgcttttaagattttttctttggatttggctttttgcaagttcacgatgctgtgttagctatagatttctttctttaacttttcttcagatttgttagtattctggaatctatggattaatttttttattacttctggaaaattctcagccattgtctcttcaaatattgcctcttgtccccttttccctttcttctctccttttgggactcctcactaaatgtagacaagacccctccctctgtcaatgcccttatgcattgtttggcattcttcatctctttgtctcttcacactattcacttttttttttttcgttacttaacttacagttaattgattctctctttagctgtgtctcatattcttttacacctttacaccagtatttttaatttttcttttctagaagtcctatttttactttttttcctcaaatatgctagttacctttaataggtttattttccaatattattagtcaagtttgtcatgcatttctttatataaagatatttgttttacagtcaatgtttcatgattccattatctgatatatttgtatatgtttctgttttctattttatgctgttctcactcttagtatcatgttttcttgtgtgcctggttacttttggctctgtgaggctcattgtatttttttacaaaaagctgaaaaattttgagccctaaaatgaaagcaccttccctaaagaatgatttatatttacttctgcaagatgaccgaggtctatgtaaactccattaagggtgtctaatttctgagctagcccaggtaattcaaaccgtaacacaatttcttggagagaatgtttgtcttttggttcactcccaccttggggatgcagctttttgcagtctccacttattgtacagagcttttcctgttagactccatcacttcaaaagggtgttgggctttgattcctgttcccctgtcctttcagattgtcaaacaaaggcttcaatttacctgactcagcaaatgccctcaggtcaggaaccagctgtctcttggttcatgttttatctttaatttagggtctggtaattctgtaccaggaaggaagcttttgatacttttaagaaagatgtaaactgtctcatccagttcctttggtagttttcaaagggagggtagcctgaataacctaatctgcagtacctgtttaaaccacatcgcacatctgctctccatccacagcttgaaacttccttatgcgatgatgagcctacctatgaggaaagggcaaggcatgtggaagccactccactgctcaccagctgtttcactttgtacaaagatcaaagtttatatctttctgtgtctcaatatccttggatgcgaaatggcgggaccaatagcctgaagtgcctgtgcctaccccacagggttattccaaagctcaaaatgatcctcggtgtgtattttgctggactcagtggtacgtatgaatgtgccgtttggaatttcaagcctactacttatgtgtgggacttggaattttctggcttgtcaaagaggggagggccaaagggcaaatgtagggccaggaagaggcgcaggcttccacccatgagaagaaaatctttaggctaacagtgacaaagcacagcagcagtaaagcacaggtgctccaaacctgaggcttgcctcaccctgcctttccgcccagacagagagtgatgactgggaggcaaggccgtggccttctgtttggaatgtcttgaaagcaggtttgtccttggagcactccctgccataagcccctcagcctccctcctacctctccttttccctcccctcttagccagggctggccgctcagcgtcagttctacttggcaggccttcttttcctcatctttatcttagcatttgtttcccatcttatgaaaaattgcttatctacctacaatcaacctttcagctcagctccctatcagctcctttatcagctctaccatcctaacttctcatttgtttctgacaggcatcctgtaacaaattcttaatttgatgagcttgatatagcccactggctaaacagtgagctgaagccagggctggctgcaggaatatcccatactgttcagccacccattttcttgagagcagagagtccccaaaaaagggtggaaatgggagaggagcaattctgtggggcatatggcagcaggaaaagaaagcctggaacaacagttttccatggggaagcctggaagacagtgttggacagaggcacctgaggccagagatgtagatgggtagatgaataagaagttggttaataaaagagagagaaaaacaacttgcagctttgagatacttcttggtaattatagatgggaaacacaggctcggatacatgaatacctgggtctttttgtcctgatatatggctgggtaatcagagcagccgtccatgtgcaccatgatttctgaaaccattgttcagagtgacattgactgtctctgaaaggttaatgggtatttacgtagggaggaaaaatgtaccttggttaaataagtttaagcaactgtgtgtgctccatttcccatttggagatccataggatataagaacttaaagattctaaaaatcctgcccttgatctaacgaacccagtttccccagacttgtgtgacaaagatgtcctctttgcagaatactaattacagtaccgtcttgcaggatacttagaagaaaatgttgattctaaagccatagtaggctctgttttacctctgctgctattaagggattctctgtccaacaacaatgtttctagaatggtaactgtgagcaaaatgtcctttctggaacacatgccatgtcctggagcttaggatctggtaatcttctatctcactatctgatgatgataatgaccccccatttattgagggcctgttaatctcctaggtgctttttctatgcatgacttctaatcctcactatgatcccacaggagagatagcattaccccatttcttctatgagaaaattgagagtcgggcttattaaataatgtgcccaaggtaagcggctaagccaggatttcatccaaggtctggctaactctaacataatgtttgttttcatcacactatacccattatgaaaatggggcagatttcaaaaaacagagaagaatgatttaaaaagcaaataaatttagcagcctgtctagttacatacaaggaccacttattgattgaatgctagctctaggaaaacaaaaatctgaaaattatctagtcctattgtttatttttccccttgtaaataaagaaactgagatctgtagaaagtaaaatgacttgctcaggctcacgtggccagctggtttcagagtcaacatgatcactaccaattaccctgacttccagtccagagttacttatacccatagtgactttttccccctcctctcagagactgtttttcaggctaagacttgccaaaatgctcaatttgcagtgtgaagatgataaagacctcctcaggcctgccctcagctcggcccctctatgaggaggcatcaggaacaaaggctgtcctttccatctgcatatactgaggacctcgtgcagaggacataggagctcagcttgccatcgtgctgcactctcctgagttctccctggatatggagtctggagaaatgaggcagtctctgcaggtttagctgggaactcaagccaagcaggggctggaaggcagctctctggactctgccaaagcctcctctcacctggtgttgtttgctatccagactcttcctgtccaccaactcttctagatttgagctgccaagtaaagccggcagccaggcacttagcccttagacgcactgacagggcctgtgtgttctactgagcacccggctagagacagaccttatctcctgcctgcccctccctggggagtgtctccccgcaacccgtcttcatccccagcattcttcaatctccttctcgcccacttgtctcctggttgcttctcctattatttctgtgattcctctcttccttttgtctttatctagaactgttgctttgtttccccctcaccttttcccatgtttcacagaaggccagtctccttttccccacgtctctgtacacacccactgtgaatgcactttgttttcacctctcctcagctgctcagtcctcctaagtgtctctctgtgctccgccgtggcattgttctcaagtcccatctaccgctggccttcctttggccactcttccctcattcctttaattttctttgacctctttgtatatttttcttctccaatgtgatcccttctctctctcccacttctataaaagactcggtttctgcatcactggaagaccgcaccaccattctgtggtgatggtgatggctgctgggttaaaggaaatcagtgtctcctcttctggatgggtttggatggtttccagtgaggtcagaatcctgttgcccctgctgggattctccagcctggggttctcattcttggcgccattgatatttaggctggcgaatttcttcttgtgggggctgttctgtgtatgatgggataccgggcaacaccccttatctctacccactagatagcagtaacaagcacatcccaattgtgataaacaaaaatgtccccagacatttccagatttcccctgggaggcaacatcttccccatttgggaagcacagccctagcccacagcctgcagccttgcttctagaaccacatgcggagttgaggtttctatgcctgttggataagcagaaaaagatgtggaagtggtggatgctgtcagtggagacacaagaagtgtgtttgccaagataaatttgagcctgaacattttttttatctctttggtttgagtctgatctctttctactcctttcttttagctctttagctctcttttggctctcttttagctgtcttttagctctttcttttagtcttctttcactgtaatccaaacttctttctctcctgacaatatgacgttcttgagttgcagactgctaaaaacggctctgattaagccctttaagtgattcctgcagaagtggctctgacggtgttccatctgtaccctcagaaaggtcaaggtgtcactcggctgctcgagggaactctgcttctgggctcccaggtggttaatgcctgtttgattagctgtaaaacaaaatccagaaaatgccaagaggcaaatctcaattcacctttcagaatgaagctcactgcccagtcagagaagggggtgcggagtgggtggtgagatccacagctgttaaattcgcaacaggtaagccagcaaatagactcagtcctaatgcggctgccctcatctgctgaaccacctgagtcaccttcacctttctgctgctgactcttggctggaatgtggttcagtcctatttgctctgctttccatgcagctctgccttccacttgggtgcccacttccattccagtcagcctcccccttccctgctccactgccgtcctgttgctttccttccaagctcacctctacacccaggaagctggtctcggttgcacatcttcacctcgctcctctcacaaatgcatctcactcccaaatctgctgcaaaacatcagaaccaaagaataataataataataaaaatagacatacccagtgaacgtcctcctccattgagctcctcccaccttctcttctctatccctgcaccacatctgtgcatactccttcctagaaggcaaatgtggaatattctgtctaggctatgcagagggtgggctcctaggaagcatctcctcattcacttctctcttgcacataccacacacaatggttctaacaccatggttgtcttgctttccaacatccttttcatattattttccaaatcccagtgtggtcctcccacgtgcagcccttcattgaggaagacagcattactgaccagaccacagtcatgaccatagcatctgaaatgagcaacgcccatcacccagtgcttccctcacccctccagtgtccatcactggggcagcatgccaggaatgttgaccaggatttagagtgcgggccaacctaatcacttgcactgttcggcctctgcaatggatacactttcctctctcacagagccaatcagccaccttccacctttgagttccatcactttgccggctttttctcattctctgtgctcttcctctcattcctggctctccaggtcctttttccaccatgacattcctaaagagaggtgcttgctggatgcgagctggctctcgctctgttggttgattttttttttttttttcccctgggcttgtgtggactggcagggcctgttctcagatggaaggtgtgaaagtggcataaacggcacatgagtgcatctgtttgttcccagtgacttcaggagaggcagaggtgggccaatcagccccactctcacatatggccccagcgattccagccgcaggagagtgggcctgccgcccacggacccgtgttatcgtcgggacccctagctcccacagacaggatgtgtgtgtttgtctggctgcatttctgcaggagcatctgtcactctccaatatttcctttatcattgcagcaaattatttaaacactacccactgaaccccatctgtcaccgcgccccatcactgtcagggccctgcctccccaggtctgcaaagcaactcgctggcaaaggctctgtgccaaacaacagggcaaattaaatcaaagcgcgctctggcacccagggggaaaatgcacatcagttttgacttattgcatgaagcacgcttacaagagagaaagcagcggcttttgtcactgcaaggggccatgagaaatgaattagggcctctgctgagagggcatggaggagaatctttcattctgagatgttgtcctttctcaccttgcaagaaggaaataataaaaggagaacttgtggtgggtctaagtgtctccaagctttgacactatcctgaagcacttctgggtgtagaaaggaagtgaccagttggagacaaaaggactttgagaggcttggaaatagcctgagttacatggtgccaccagagggtgagaacttgagcaggtgcaggtaagagctaacggcatctgtccatcccgggaagctggagcggggagggacagagggaaatgcaggcctcatcctcactctgccctgcagtgtggcctgggaactcctgaagaagccagcatgacaagggagcaaaaccaatgtcaccaaaccctcactacacaccacttgctgggataactcttcttcacacttgatctctttcaatccccagattctcatgagataggaattatttttgcccatcttacagatgagaaacctcaaaaagtttaaagcgattgcttgcgatcatccaatttatgtgtggcagggccaggattcaaaactacatccatctgatttcgaagcccattgcctctctttataaaagaatttctcctctgtctccctgctccccgtgagacacagctcatttgttttcctataatgagggaggggccttcgatttcctaatagattgctcacctgccgtcctagtggagctggcatttactgtggcatttactgtgtagctgcagagccttccccaccagacacatttgtactttgtgacagcaagaacacatggacagctgctggggcatttctaacacagcccttctcaggcagagatcttggctggggacagcatgactccatcctccaggagaggacaagccatgcggcatctctaattagaacccaggctggaacattcagcttaatgagctgggagttggaaacgctcagctggaaacgagttggtctggcagaaaggacataggactgagggacacattttctaaactctgtcctcatctcagttgttaatcatcttctgcttctgtctatccatcagttggttattagactgtgttattgtgcatttgcctcaagttcagagtgaacatgcgttaaatatattggacgatggcttaaatggatgatttttcctatagtcttctaggaggtcgctcgatgttgccaaatacttgggcagttcttggactgctgacatattttaaataggatgtgccaccctaagtagtgtctttgctttttgcactctctcaaaactagggaagtccaggtcaattaccatagtgttgtgctttgccatagtgattttctcacctaggcttctctctatgtatttcttgagagtttggacccatataactttagccgtcttttgaagattgttggccacaaaagagaaagcggacaactctagacctagggccacagtgtcaagggaccactgatctaaaatgagccttttgtgtggcccactatttccgttcaacacaagtaagcagggacaccacgtggaaaagagaatgatgcttatgactttgtcaaaaattcataagcacattattgtagtgattgagtattcacctgtaagatagtgacagacatccttcgtgtgtgtgacagtcaaactgaatgttcagttcaattcagtcaaaatagtccaattcagcaaacacccaatagttctgtttggaagcatcttctgtgtttaattccataagtttcctatttgtgtcctgcccctgatttaactgctagaaatattactcatctctttgtgattttaaaggaagcattgaccacctcccctgccttggtttctctgtgagtcactgctagatacggctgtgggagcaggctgatgataggtaagaatcatgtatctagaatctctctccccacaaatatatgactttctagtaaaatcatgctttcaaaatagttgccattttaaatatgaatgtaagttttgatatgattaatattggaaagagccttaaattccaatgcataaatttaaaagaaaaaaaaagaccttgaggcagggtgaggaacctctgaagaagctcaaatgaaaaaaagaaatgtagaaactgcacattgcagactgatggcactgcagggtcagctgtaaaatagttttttaggccaggcttggtggctcgtgcctgtaatcccagcacttcgggaggccaaggagggtggatcacaaggtcaggagtttgagaccagcccgaccaacatggtgaaacaccatctctactaaaaatacaaaaattagcctggcgtggtggtgcacacctgtaatcccagctactcgggaggctgaggcaggagaatcgtttgaacccgggaggcagaggtttcagtgagctgagattgcgccactgcactccagcctgggcgacagagtgagactccatctcaaaaaacaagaagttttttagttgatcaccaataaatcaactaggacagttttttgtttttgtttgtttgtttgtttgtttgtttgttgagacggagtctctctctgtcgcccaggctgtagtgcaatggtgtgagcttggctcactgcaaactccgcctcccagatcaagcaattctcctgcctcagcctgccaagaagctgggattacaggagtgcaccaccatgcctagctaatttttgtattttttgtagagacggggtttcaccatgttgatcaggctggtctcgaacacctgcaactaggacagttttgagtagaatcagttgatgaaggcatttgcctgggtggcgggagcaggagagatgtaccttaggaaaacatggaaacttttgtgaatgggaaacaagggaggaggaggactagcatttaagttattttgtgactttctaattagcaaagaactcagcctggcaccaaactcaaagctaaaacctggctgaaacaggcagtctttctttagttaccacggaagcccatggatgaatcaatgttaaatctaaaaaatcacccagcctttttttttttaaagataagagaacataagttcagagaaattaagtgaatttctcaaagtcacacagctaattagtagcaaaagtaaggtttccagacagtgtaactatttttgtaacagtctttccacagcatcatgctgtctctgaattaccatgggaatgtttatttttgcttttgcttgttctatttgtttttaagaaagttctaaactttgctttggacagaggtgcttcaaaatgtggatgatgtaattagaagtaagagaaaccaaaaaatgaattaaaaagtccacaaaaaaattattaatatggcactcagtgttaagctgaaattctggtacaagcttgtgtcctcgggttttgacttgtctgtggtttgtacaactagactataaaatatttcaaaaaatgattttattcacaatctggccaaactggcttgttctggctgaagagctacatcaaaagagggtcaccagatgggaaagccttcgtctccggggcatggcctaaaacacagctgaattatccggtgttggcagtagaacaccacggaaccttctgttcaaatgtgccctgaacccattaagtcatgagcctcaggctggtttagagagtggcttctaggcatctcgccttgttttctcctgagcaccacttgtagacctactttctttaggaaagggagacagagccgttggcagctcagatgtgaaatggggtcatggaaagagagcatgcttaggagtcgaaggatttgggcactgttgctggttctcgttttagctgcacggtcatgcacatgtctgttagcctgatgtgaaggtgacgcaggtcactcattccatttaggggtggctgggtgcactaacccagtgtcttcttccttatctgtagaaaaggtgggctttttatggagataagaactctttggccaagagagtagaggtggctccacctccctgccagaacttccaaacaagctctcaagggccttaacatgtcacctcatttctctgagcctccatttcctcatgcttaaaatcaggttgtcttgaagcccaccccacggtggatggaaagtactgcatgggaatcgctggggcatgtattggaatgccagttatgagtgcacctggggggcacagacgcacggctcacagcactgcagcttcctcctcccttttgccgtggttataatactttgaagagcagggcataccagtagggcatgcactgggaagaggaaagatcctggtcttcttctttgtttagtcagaattggttaaatgcagaactggtagttcagactgcccatgttccagacctagttagatggaggcatttctgacatgccttttaagattgaaggcagaagcacagaaggccgtgccagcacaatggaagatagaatgcttgtatctcattgtctggagaatagataggttgcaggtttcagtagaataggagctgccagtcaaacctttttaatagaatgggagcagatagatttcaataaaagaaatgagtataaatattgtgagtggaggaagggagaaagcagacagatcatgtttgactagtcacagtggggaaactttgcacgaagtttaaactgaaaacccataaagccaaggtgggtgactgggttgaatccatcgacagctgcagatccagggcttgccccatgggcatccattaaggaggctccagctggataaagagcactccaagtctgtggtctttcctcaactctaagcccatcccagccaagtgcaatgagcattcagctatctgttttactggcatcctccacccccaccctatacagaatccacggaaccctgctggcattgtgcctgtagctggtgccttattagccagggggactctgaaataattcccccaggagtctctccagggcagtagccccttccaccatagtcccagagaattatttgttagcagctgcctgatttgtccccaaattagcaaaccaaccacctaccaaggccttttggctccttctccccactgcctcaggttcccaggatttctgtgtattttacccaagggtgggacttttggccattttgtttgccactggccacggttgactaaggctgctataacaaaataccatagatggagtggcttaaacaacagacatttacttctcacagttttgcaggttggaagttccagtcaaggcactgacagattcagtgtctggtgggggctctcttcttgacttgtaagttgttgccttcttgctgcttcctcacatggcagggggagagagagaaggatcatctctttttttatctattcttacgaggactttaattccattcacgaggactccaccctcgtaagctaatcacctcccaaatgcctcatctcctaataccatcacaatgaggattaggtcttcaacataggaattttggaggaacacaaacatctactccatagcattctgaccctgtcattcctcccaaatgtatgtccttcttacatgtgcaacacacttattccatcccaacagcctcaaaagtcttaactcgctccagaatgaactctaaagtccaaagtctcatttaaatatcatcttaatcaggtgtgagacaaaatttctttgcagctgtgaacatgggaaaacaagttatgtatttccaaaatacaatagtgggacaggaatggggtaggcattcccattccaagggggagaaattgaaaagaaagaaggggcaacggttcccaggcaagactagactacaaggcaaactccatgagatcttaaggctcaagaatagtcctcttttgctacaggaatatatcttcttttgtttgatgctctgccttccagacccagtggggtggcagtcctgcgcccacagttctgcagggcagggttgcagctccatggccttgggcagctccaaccccaaggctgttcaagggggccatctggcctgttgaaactgaggtggtgctcccctgacctcatatgaaacttaggaggctgccctggtgatctctgaatcacttttttgggtcgttcttcccttgtcttgaagaattgcacacattcatagctgagtagttctaggtaaaatccaagaaatcagacaaccttccttccttctgtttccttcagtttaaaccagaagttctcctgctaggtcagctgattagcttgtggttcacatccacgctgacttccttatcaagcaatgagtctgccacgcccttagtgttctttcttttccaaacatgcttttacattttgtataattcggaccagctgagaattttccagatctttacgttctggttcctttttttttcctgaacaattccatcttcaattcatttccctttctcacatgttattattagcagtcaagaggaatcaaactgctccctcaaacacattgcttagaaagttcctaagctaaatatccagtttcatccctcacaagctctaccttccacacaaaacactggaacgtgaacaatattcagcaaagctctttgcaattttacaacaaggattacctttcctccagtttctaataacatgtcctttatttctgtctgaaatctcgtcagaacggcttttaccattcatatttctaccaatattatgtacacgattattttggcattctctaagaagatggaagctttctctccagttttcctgttttctgttggaatcttcaccagaattgcctttagtagtagacaggattcctacaacggaatggcttggtcatagggcatgtttattttaaatgtttatattgccacccagcttgccctccataaaggctatgtcaattagcaatctcaccaacaaacagaaatgtctattttcccaccctttggcccataacagatactttcaatagtttacgtttctgccagtgtgataggcaggaaattgcacctatttcaattttcatattccagttactagggaagctattgtgcatattttttcatatttcatatatttattggatatttgtatttcttctgtgaattgcttgtccatattcttcatccatttttctattgggttgtttatcattttgaaaattgatctgaaaaagcagtgtatacattatggacgttaacccttttttataaaggttataaagggtgcagatatccctcccagttattttcttgtcttttactttattttatagtatcatttgtcatacaacagttttagatttgcatgtaataaaatctgtcaatctattcctttatggctttatcatctcgtgttttgcttaggcaggcttgcatttatacatacactgtattgtatatttgcataaaccatcttaaatctcttaaaaataaaggcaagatataaagagatgaatgaattaaaataagaagagttcctcccaggcatatcacatgtgaagacagtggtatcttatatttacataccacttttacttcccaagtattttcaactttattatctcattacccaggccttgcaatgtttccgacagacataactgccaaaggcaacctcaagcagctgctcatgtatttacctctgttgccctctcatggaaagggcaagagcatggatgacagctcaagtctcccttctcttcttataaagctgtgcctgtcccaccagcaggccccaccataatgaccttatctaatcctaattgcttcccaaaagctccacctccaatcaacatatgaatttggggatgaaggttccaccacatggaatttgaaggacacattcaaaccatagtagtagctaaggtgagaggattagctgcatgtgtaccagctatggagacttggagcaaataattttcacttttctcgtagtattgtcttttaaatactgtggcattagaatctactcttaatttgtatggtggttctgtgaatgaaatgggattacccatctcaagcattttaaacataaaaatgctcaaagagccagatatatttttattaaaaaataaaaactggaacagcttctggcatggttgaaaggagatggttttgtacgcaaacgtaggctttacttcttgttctgccattttccagccatgagattttgggcaaattacttaaattttctaatacgctaaagttcatttctggtccagaggagacatcaaatcttttctgaattcgttcaccagaaacaacccaaactctcccttgccttctgaacctcaaactggtagcaatgttgtaccagtttggattcttcccttgcataaaaaccagcactgatgttaatgtaatctaaggggaatacattgccgggaatctaggggcttatggaatttatgaaaagctgggtcaaatgcaggaaacatgacagtgaaggtggatgggaagtagggagcactggcatgatcattgtgatggtgatgatgacaccaacccgtggcatgcagtcgttgtgcatcaggcactatttcaagcattttttttatgtattaactcattcatttctaataacaacctgaatgaagtatgtgctattcttctccacgttttatagatgagaaaactgaagcacaggcagagaggagttaagtagaaagcccagggaaacacatccgcaggtggcagagatgggatacactgttgggatttcccacctgtccaggttcagggttcctagaagacagacacttaagccaaaatcatgtctgctacttccttaacacagggtgctgttctaggaggaagaatgaggaaaaacatgaagcaggacagagcaggagggagagcaagtacaggggtgacctttctggagctggttacaggttcacagtaatacacctgcctgcctggtctatgggatggctcaggagagtcacaagaaacaactgcacttcaggacagtcttttgtgggaaggagggacagggattgatcactcctggttgaagcctacagcaaggggcattaactctccgcaagtccagctgtgtcgcccagtctcccaggcagctagagcctccctgaggtgagtccagctaaggcacaggcatagccatctctcttgttgccagtgtggagtggggagccctggatctgtcctagtagtggcatctgaggccgcctcattacaacctcagagcagtgtgagccctgctaagattgctgcagggagggatgaagcagaaactgagacccaacctctatctaaatatgattttacatgaatataactctaggtagagccaaatagaagccacatgtaatgaggagaggcttttaatctcttcctctgagacagtagcatgatctaagttttaaagacagagaactcaagagctagaaggattatgtgatttgaatgaggttttattgctgtttagacatggtggtgagaaagagaatccaagtgccctagatctttctgaagttttgatttttgttgatagcatagatttaatatgctcataacagttttgggtctggtggaaggagtttcagagaggaaaagctgtgaatgtgtgtgtagatggaatttgcctaattgttttagaacaagcacatattgttgaataacttagttgacatttgaaccagagaaggccattaatagattttgaatgtaaatgttttatttgaaaccaaatgatctttatagagactacaagcattagaggttgttagtcctcatcagggaaagttggcgtatcaaatcatgacggaaataaccaacactgcagttcaaatagcagaggaaagacgggaggggccacccaccatttatcaacattttcatgtgctagcaccttgtaataaggacaagcagtatcttatacatgtctgctgtactccctttccctggagtagctagatcaaaggatttttcctctgaaaagctcatttagtctcatagcaaagattcagtagatgaaagactagaagtgcagtccaggagcataaaatcaattaacttaaaaaatacagtgtaatatattatagctggttacttagagatgctgctactaaaacattgcaaacatcatcggaagacatgctatcatttaaatatatacattcctcactctttagttacatgactctctttaaatctactgaaatttacgtatctccctccctcacactttccttacccatagttgatgggtttcaaatccacacgcaagcccttatcttgggttcttggatgatttttttttttttttaattttcattcagatacctttaaaaaaaaaaactcatgggagctgggtgcatggctcacacctgtaatcccaacactttgggaggccgaggtgggtggatcacctgaggtcaggagttcaagaccagcctggctgaaatggcaaaaccctgtctctactaaaaatagaaaaattatccgggcatggtggcaggtgcctctaatcccagctgaggtgggagaattgcttgaactggggaggcagaggttgatgcaggagaatcacttgaactggggaggcagatgttgcagcgagccgagatcgctccattgcactccagtctgggtgacagagcaagactccatctcaaaaaaaaaaaaacaaaaaaaacccagaaacctcattgaaaaatcatatcatatccatgaaactttcttaatggagtgcatatgggtgttttttttgcattcaggaaataaactaatagaaagaaatgatagtcaaacacaaccacaagaacactgcctttcatgttcctgttagggacaggctcttaggagtcaagaactagattgtagaatccaagcccctgggttcatacctataatattaccaaataatgactttaacaaatttttactgaatgcttaaatgtgtaaagattttgccactatggagcaagagttatgtaaaactttctccttacaacatagtagttagaccttagttccaataagacttatattaaaggtagacttctagaatcccatatttttcttaataactacaatttttaagtcatgatgcctcagcctcacatctgtgttgcactctgctagctacgtatacactattattttatttcaatctctatcacaaccatgcaaagtagacatcaccctcctttttcaaatgaggaattcagactccatgaatagttcagtcaaaatttcacaacacacataaaatcatcaaacaccttctgcatcttgttttatttttgttttagaagtttggcatacaatcgtgtttggtgagggaagaagctgcccatatgtttaggtttggctaatggttgtgattactaattcaagtgtgtgtgtctgtgtgtggtgtggatgtgtggagtgtggtctcctctgtgtgtgtgtgtgtgtgtatgtgtgtgtttgtggtgtggggtcctctctctctctctgtgtgtgtgtgtgtgtgtgtgtgtgtgttttagatagtgcgttaaatttaggataattttgcattatttttaaagataggtctgagctaatgctaatattttagttccatagaaggaaaaagtccagtttgctatgagaatagtaacattgtctacgctctctctagcagaaaggaaaggatggtgagtctcagtgggcagcctggggaaggtcagagaatgccagcttgttcctgagtggcctcagtgatgacccagacatggtcagtcatgattcctcagacttgggcataatcgaaggatcatctggatctctgcttctcctaatgcctttatcccctgcattccaaagcaagaggggagaaaagcaaaattgaatctgaaggcagactccatgtgaccactttaattaaatgtaagagtggctgctgtgtgaggcaaaaggaaaaaactcaggagaaagggcatgatattgttttgaagcagggaagccgaggacatacaatagaacaagaaaataaagtatggaagttgttcaactaccgtctgcttcgtatgcattctattgcaggtgtagagatctggagagaaggacagagagggcaatactagtgattttgtttttaaataagttaccaaaggtaattaagtcttccttttgtgcttcaatggaaacagaatgactcaagctccaaccagcaggatgtcatgcttcctgggctagactgcaccgtctatcccactaaaatgggcaaatatttcactaccgtttggtacttctctatgttgccttctgttaataaaatactcatcaataacaatcccatctaatatggcagattattatataggtcttataatgtagttcaatttatgtaaacaagcctgaagaatagatattttacaggccaggatttatatacaaattgcatcacccataaatgctacagccaggattggaatcaaggtttctgacttcaattcagtgttctcttcatgacatgatactgactgagagtgaccactgcactgtggctgttgagggtgagaaagcacagtcattgttgactgggggctcctggcaagccaacaatgtaaaaatgttccagaaaaatcccatcactcaggagtcaactctgaacatacacctgagagatgtgtcatttacttcatcaagtgatttgtgtgtggttttaaaactcaactttactgggctataatttacatacaaagactttcaaacattttaaggttgatgacttttgacaaattgtatacagtcaggtaaccaacttaatcaaaatataaaacctctccatcgagcgagaacattccttcatgtctctttacatttctttagtcattctctctcctcagcgtcctactccaggcaaccactcgtgtggcctctataactacggatagcgttttattcatatgagatcatacgtatatattctttagagtaaggcttcttcacttgacatagtctctgtgagatttgtctttatttttgcatatagtttacattttattaagagaccatatattttattttttattattattttcttttttgagacagaatctctctcgtttgcccaggttggagtgcaatagcacgatatcggctcactgcaacctttgcctcctgggttcaagcgattctctcacctcagcttccggagtagctgggattacaggtgccaccaatgcccagctaatttttgtatttttagtagagacggggtttcaccatgttagccaggctggtcttgaactcctgacctcaagtgatcagccgatcttggcctcccaaattgctaagattacaagcatgagtcactgtgcctggtcagagaaccatatttttaaaaatcagtttatttgtccaaagaaatttaggttatttttagtttaaggttattatgactaaaactgttatgaacatttttgtatatgtctttataaatttatttttatttttttttttacttttttggggggtaatagcaaggattagaatggctgtgtcacaagtgtatgttaagatataaaaaacaattttgaaaaatggttgagccgctttacaccaaaaatatataagccttccacttgttccacatccttgctctttggaattgtgctttgtgtatgtgtgtattacaattaactaattaaaaggtaatacatgaaaatgaataaatgcagttgttagcattgttgagatatgattaacatagcttacaccttattcatttacaaatgtataattttgtgagttttggtatatttaaaagttatacaactacccgtttattgttgtgcaatacaatcaatttagaaaaatgttatcatccccaacagaaacccataccttttgtaagtgaccttcatctcaccccccagcacattaccttccctaaggccaggcaaccactagtgtactttctttttctataaaattgcctgttcggtttatatcttttgtcttttgccactgctttgttgacttagcataatgttcttaaggtccatccatattgtagagtctatcagtagttcatttgtttttatgactaatattacactgtatggatccacattttgtttatccattcatcagtggatggacatttgggttgcttccaccttgggactattgtgagtaatactgttatgaacattcatgtacaagtttttgtgtagacatatattttcttttctcttggttttatacctaggagtggaatagctgggtggtaggttaactacatttcaccctttgaggaactgccagactattttgcaaagttgctgtaccattgtacattctcactttagcatatgactcttccaatatttcaacatctacaccaacacttgttattatccatcttttttattatagccatcctagtggggtggaagtgtgatctcattgtggttatgatttgcattttcctgagggctaatgataggaactgtttttgatgttcttattggccattcatacatctttggagacatgtctgtttagaactttagcccatttttaattgggttgtcttttttttttttttagtgagctgtaagagttctttatattttctatatatgaattcctaatcagatatatgattggcagatattgtctctcattctttgtcatttcactttcttggtattctttgaagcactaaacttaaatttttttgatgttcaacttatacattttttgttgcttgtgcttttgattgtcatataagaaacaaatcatttccataggaaaccattccaaggtcatcaagatttatccctgtgttttcttctaagagttatagaacttatattatgtatcttgagttaaattttgtatttagtatgtagtaagatacaactttattcttttgcatgtggatatctagttttccccagcatcatttgttgaaaagactactccttcccctaggaactgttttgatacccttgccaaaaatcatttgatcataactgtggggtgggagtgttgctcctaaactgtcaattttatcccattgttctatgtatttctccttatgccagtatcacagtctggattactgtagctttatagtgatatttggaatctggaaatgtgggttctttaaatttgttctttgttttcaatattgttttagttcttctaggacccttgaattgccatacaaattttatcatcagcttgtcaatctcagcaaagaagccagctgttattttgatagcaattatattaaatctgtaaaataatttagggaatattgccattttaacattaagccttccaattcatgaacatgggaagttttcccaattatttagatcttctttaatgacattcaataatattttgtagtttgcatagtaaagtttgtcactattttattaaatttattgctaagcattttattctttttgatactacggtaaaaagagttgcttttgtaaattcatttttagattgtttattgaaaatatatagaaatacaattgatttttgcatattgctcttgtatcctgcaatatttctgagctcatttattagtttgaattttttttagtggatttcttagttttcactgtatataagatcctgtcatttgtgaatagatttacttccttcctccagtttgctttttattacattttcttgcctagtagtcctggatacaacatagagtacaatgttgactagaactggttgagaggagatagccttctcttgtttctgatcttaagggaaagcattttgatttttaccactaagtataatgttagctttatgatttttgttttgtttttgtttttgttttttgtagatccacttctacaaaaatgttctggttcggattgaggaagtttcctgctattcctagtttgttgtgtgttttttttatcatgaaggagtgttggattttatcaaatgcttttactgcatctcttgagattattgtgtggttttgtaccttattctgttgaaatggtatattatattaatcaatttctggatgttgaaccaattttgcattcctggtagaaattccattgattcatagtgcgtaatcatttttatttgttgccaggttttgttgactagtgttttttttttttttttttttttttttcctgaggaattccacatatgtattcataaaagatattggtctgtagttttccttccttgtgatatctgcctggtcttggaattagggtaatactagctgcatacaatgggttgagacgtatcctctactatttttaaaaataatttctagataataggtatcagttcttcaaatattttgtgactttaccagtgatccatctatgcctaagctttctttgtgagtaacttttgattactaatttaatatgtttgttaaagtcctattttgatttttaaaatatctccttggctgggcgtggtggctcatgcctgtaattctagcactttgggaggccgaggtgggcatatcacatgaggtcaggagttcaaaaccagcctggccaacatggtgaaaccccgtctctactaaaaatacaaaaaattagccagcgtggtggtgcatgcctgtaatcccagctacttgggaggctgaggtaggagaattgcttgcacctgagagacagaggttgcagtaagctgagatcatgccattgcactccagcctgggcaataagagtgaaactccatctcaaaacaaaacaaaacaacaacaacaaaaaacacaacttcttgagcctatttcagtagtttgtatctatatgaatttgtccatttaatctaagtgatctagcttattagtatacaattattcataacattgctttatgatcctttttgttctgtaagtttggcagtaatgtttcctccttaattttttattttagtaattttacttctatttcttttgtttttttctttgttcagccttagtaaagccttgtcaaataaccaacaattgattttcttgactttttaaatttattttttatttcattaatgtcttcttttaaaataattttcttctttctgcctggtttaggcttagtttatgcctttttgtccagtgtattaaactgaaagtttaggttattgatttaaggtcactctcttttttttaatattatagacatttatggatataaatgttcctctaagtattgctttgctgcatcccaaaagtttttggtttttgttattttttaaagtttcaatatattatgtcttcatttccatttatctcaaagtataatttgaaataaattccagatgacctgctcttatatgtaataaattccaagtttcctttggctcattggttatttagaagtgtattgttaggttcatgtatttctgaatttctcgattatttttctgttacagatttctaatttcaatccattgtggtcagagaacatactttctatgatttcagtctttcaaaatttattggaacttgctttatagcccagtatatggtttatcttggaggataaaccatagcatttaatgtgttccaagtgcacttgagaaggatgtttattgtgctattcaatggagtatactatatgccagtctctttaaattttagccagtccagtgagtgttcagcgctgtttcattgtagggtgaattcatgtttttctgcttagtaatgatgttgaatatcttttcatttttacatgggccacttggatagttctttgcccattttcaaataaaatgcattatgttatttttgagttatatgagtatcatatatttgggatacaagcaccttgccagatatatttggattgcaaacatttcatttcattttttgggttacattttcattttcttaagttatcttttgataaacttatatatagttttatggcaagtctaaagatctttggctaccctaaggtcatgaagatgttctacgttctcttcaagatgttttatagttttagcctttatgtttagatgtacaatccatttcagttattttttatatgatgtaaggaaggcattgagatattttttcatttttctgattcagatatccagtcatcctagaacgtgtattgaagggactatctttttaacactgaattatattggtgacttttcaaaaatcaattgactttatatgtatgggtatttgggaactaactattctcttccatcaatgtatatatcaatccttgtgccaatgccacagtgtgttgattattgtaactttctagtaaggacttaatgagatagtatgaattctccaatttgatttctcttttttttcattttttgaaatgaattttttttcattttttgctcattctgcatacttcgcttttccacatatattgcagagcaagttagtcaattctttttaaagtactgtgttttttactggtgtttgtttctttaattttttattgatttaactgatacattacaattgtgcatatttatgaagtacaacttgatgttttatatatatatgtatatatatatgtatatatatacgtatatatacgtatatatatatgtgtatatatatatatatgttatataatgatcccatcagggtagttagtatagccatcgcctcatgtatttttcatttctttgtggtgagaacattcaaaagcctctcttctagctgttttgtaatatataatattttactgttaaccatagtcaccctgcaatgcactaaaacaccagaatgtatttttcttgtctaattgtgactttatacctattgatcaacttctccccatcctcgcctcctgcttctccttgctagtctctgataacgactgttctactgtttctgtgatattgacttttaattttttttttagattctacatatatgtgagatcatgcagtatttgtcattctgtgtctggcttatttcacttaacctgctgccctccaggttcattcatgtaatgcagtgaagtgacagattttatttttgtgtggctgaatagtattccattgtgtatagataaccacattttctttattcatccatcgttagtcacttaggttggtttcatatcttgtctattgtgaataatgctgtaataaatatgagagtgcagatatctctttgacatgctgatttcatttcctttagatatagtcaataacgggattcttggatcataaaagttagtatagcagacctgagactactgtcatttatagaggattgcttgcaagcttggcttttggggggtgtctcagactcaactggtaaacagtttcctaaatttataaaaaatactccttaactgaggagagtggcttactgtgcatagaatgatcacacaaaaattgtggttcatgctgacacctgctttccttctagaaatctggaattttggtgcaccttaggcaggaggtagctatgtgaccacttccaattaaaacattgtctgctaagtctcaaatgggattccttagacagcaacatcatccacatggtgctgcatttttgttgtgggggaagagtgtgctctgtgtgacccttcttgggagggaaagagcatagagaagcctgtatatgggttcctgcagcctctacctgtgcctttatcccttacgattcagcagtaagtcttactctaccattgttaaaagtcttggccaagagtacaactttatgctgagtcctatgactatccgaggtgtaggggtggtcttagggactcctgacagatagttggcttattctattccactatgttgttgctagtatatagaaatacaactgatttttttatgttgattttgcattttgtgacttcacaacatccacttctatttctagcagtgctttgtaaattccttatgtttctacatgggcaatcatgtgattggtgaataaagataattttacttcttcctttctaatctgtaatcccttttattactgtttcctgtcttattgccctagtaagacttctgttggctgaaagtggcaagagtgtacatttttgccttgtttcttatataaggtggaaaacattcatcttctcattattaatttataattgattttatcgacttacttacaagttaatgactttgccttgactggatgtttttctaagaaaaggttgcttcaaaacaggagataatagcaaggcatatattgtgctggtaccaggtgaccaaggattgtaggagaaggctctattgatgaggataaaaagagatgaaaggtggcattgcaatgtctaaaaacctacttgatacctttgcagattttcctctaatttgcttttcttcttttcccttatatatctctcagttcctagcccaatgtctcacagagttggttctcaaaaaataagaatttgggcgtacttgaattgaaaccaatcagtataagggattatttttaattttgttggatgccataattatatttgataacgtaatatcaaaagcattacttttagaggtatttttgaaatatgtctagggaaaatagtatattatttgggatttgttttcaaatattccaacaaataacaatagtaaccaaaatgagattgttacaatattggtaattgtaaaagcttggtgctatttctatcatgctaaaatatatatatatatttaaaaatccatcctctgtgctactgtttaatgagaaatgggtaaattctggtttgaggactcttactttctgagttccaagaaattgaaagcatatttgccaattacttttatataacagtttattgagaactcgaaaaataattggtattaacgaatcatcaaacagtctttgaaagtctgctttgggccacagtcaccgcttaatcactgtggtattcacatcaacatcggccttctggttgccaagtccaatggacacttcttccttaccttagttcaacactctgcatcctttacagcctacccaatacttattgaggatttctgttcctttgcttggcctctgttgtacttagctagtgctgtgtaagaaaccacccccaagctttgctgtgtaaaccaatcattgtattatgctctcagatactttgggtcagggatttgtgttggacacagagggatcaacctatctctgttccatgatgtctgtgggcctcagttggaaagacctgaaggctagggatgagttggcagcaggggggctggagtcatctagaggcatcttcacccatctctgctaatccgtcagccagaacacctacacgtggcctctccaagtagtctttgtgcatagccttgcttgggcttcctcctagcaaggtggctgggtttctagaacacaggcagaaactacattgcagccccacccagacacaagagacacaagtggaatgcaagggtgcagggtcatattctccacctctcagtgggaggactgtcaaagtcagtgtggtatggagacaccatccagagatctttggaaaacacattctgtcttagcttcgtaatgctgctttacagttctcctcctttggaatgtctttcttaaccttcatttgggcttctctctctctctctctctctctctctctctctctctctctttactgcttaaatgtcagtaatctccagggtggctctgatacagatcctttctttgttcactctacgctcctctccttgtatttcattcaaccccgcagctataacttacaccaatatgtagctgcaataaacatgtaacaagcagatctgtacagctcagtcttcactcctgagagccaaatccaaatatccacaagacgtccccttttgaatatcttacagtcacattaaacttagatcatccaaatggaatgcaacatggtgtttcttctgtctgcccctgatagtcttcctgttctgcttatcacagagaataccacagctatctgctggccccaaacagagacttgtaagttattttagatgccttctttttattccagctatcttttcaattaatatccaagtcccatcaattaattcttctaaatttccttttaatatattacattctgtccatttccacagccactgcctacctgaggcacatattatctcttactggaatcattgtgctatttctctcatgaatccatttgtctttagacttggcctctgcttcctcctccattctgctgctagagggcactgtttatcacagagatctgttcatgtgactctcgctccaatcttgcagatgatcatccaagattctcaggagtatcctacagtccttttgcttgtcatgtttagatgccagcccacatgttcgcacttaatgctcaccagaacttccactactgcacgttaaatcccaggctcaaacaattatgtataaatacttaaaaccatatgtcttcatgcctctgattttttgcacaggctattccacctgcctggaatcctttccgccattgatcttccaggcctttgtttatatttagcctttaaaaatctcagcttaagtgctacctcttctattaatatttccctaataactcaccttctccacccacacacatgcccatacccaccaaaattaacacacacaagatctctgtagatttgtggacttaacactctgcatttcctttgcataccttccatataaagattcacatcgtgttataataattgtatcacagaactctctgtgggctgtccatctcttaatggtgaggactgcctcagtaatcatccatttattaattcattcaacaaataatgaccaataactcctactatatgccggttactgttgttgaaacagaccgccatggtaaacaggacttcattgatagtctgtctccagctcatggtacatgttcagaacatcagcgttgaatttttaagtcatctctggactatcattggtgctcagtaattgttgttaaacagttgatgagagaaaattccccttgatggatctcaaccgaggtcatcagagaaatccttctgtacatatagggcagggattgtgatttactagtttgcctaatgccagaaaataaatttgaggtttgctagcaaagttccttggatttatcttgaaggctgtgttgacatcagtatcccccacccgaaatagtaatgtaacatggtgaaagtacaggacactccagcagaaacatgcagtttgctcgcctagggtgcaccagctctttagttttcgggtgaacttagtctcagcaccctccgagtctactggagacatctcctggcctcaccacactgtcctgatactctcttcttttttttttttttttttttttttttttgagatggagtcacgccctggcacccaggctggagtgcagtggcatgttcttggctcactgcaacctccacctcccaggttcaagcgattctcctgtctcagcctcccaagtaactgggattacaggtgcatgccaccacacccagctgatttttgtatttttagtagagacagggtttcaccatgttggccaggctggtctggaatggctgacctcaggtgatctgcccacctcggcctcccaaagcgctgggattacaggcctgagtcaccacccctggcctctgatagtcttcttattgtgaattgtagggatagctttcatttgtttgtggttctgtaaaccccaccccagatttcaaagccacctatagctagctgttcctcagattcaacagtcattgcccacagggcagtcattggctaagaaacctctggaggaaaatcacacttgaggcaaataacattctctcactattagcagctttgatcttttttaaaacctcattttctttttccagcccccattgcattgtagacatttttataatgagcataaatgttcatttaattttatttggcatatgctgctttgaaagtgccacatcaacatggagcatcactccttcagtaactaaattcttctaacagctttaaaggaatgaccttgggtgtgaccagtgggtcttcagagcatggctgcgttttgattagctaaattttctgttagcccagtgagtccacacaccaattagtggagcataatcacaagcctgaaggtttcaggagttttctcacagggaagtaacattgatacttttcttaatatattattatttttaagtaaatatctgacagtgtctaggtaatcaattctgtgcccacaaaagctcagtgtgcctccgaaagagttcaatatatacaagtatatgcatatacgtatatgtttttcacaattcagatgcaaatacacagaaacatttgttcatcttcaaatcattttaatagatgattgggttccttgtccacccactgcccaatgactgtgggagaaccttctttcatttacagaaccccagtctgtaagaatagatatctaaaaatacagaagtctgatgcccagaaattgtccttgaagcttgattccaaagcacaatatgtgcagcccaaagcatgaccagacagtaagctttcacatcatacatgggtcaagcacagacatattcttcttttagatttggaataagggttaattgcatcatctaggaagcgttcaggaatatagccttgtgaattctcacagttatgagtactatcaaaaattgacttcacacatgataaaaagaacaagaaatcttggaatgctttcaatctcaaaaaaagtattgtgatattaataacatagataaaatttatttttattaatttctgcttccaaactttcaacctgtgagctttaagcccacatcttatcatattgttatgtttcattgccaaaagcaactacgtattgatatttcagaaatgctgccaggcctttatgtaactagttgctattttacctcaaaaaataaataatgcttcctgtttttacttttacttatctggaataagtagctattgacatctgctgaagtcagtataaagatttatttacctgagtgtagatattgaccaatagggagcctggctcaatgtttacattgaaggacaataaattgccgtattgactgggctgagacatcaatatttgcattgttgtaaacatttttaaaaatcttcatgaaatattcctcagaaattctcttgtcaccagagcagctgagctagagctctttagggaatagcttgtgtctggaagccagtgggtaacttgaaatagctataaattgttctggtttccaagtttacacaaagacacattttttattgtgatgtataatgctgatcattaggagctttcagatgacagtcccagccccctcctcaaatagcagatttttgtctacaacaactctgaacagaaatacgctccccgagtagcttgtgtcttgaaaagctcatgttttccaaaaaatatctcattgcccaaacagtgaaacatcattaattccaaccagattaattaattaaaaatgtgggatgtttcaactcagttggaataagtttttcctttgtgtcaagagtagaaagaggaagatgatttagaaaacattaggacaggtaaagtgataaattgaatatttagcctgtttaagagagaaacataatctacacaaaatcttcttacaatctatgaatgcctattaataggcattaacttaacttcttaactccaagtgatatgtgtgtttatataatatatgccattttaattaagctttgtaatagatacaggttaaacaactttatcaacatgtgttcatataatttaatgtacttggaagaaatgaaacgggaaattcctttattcctttttttttttttttttttttttttatttgagacagagtctcgctctgtctccatgccaaagtgcagtggcatgattttggctcactgcaaccttcgcctcctgggttcaagcgattctcctgcctcagcctcctgagtagctgggactacaggcacgtgccaccatgcccacctaatttttgtatttttagtagagatagggtttcaccatgttggccaggatggtctcaatctcttaacatcgtgatccacctgcctcagcctcctaaagtgctgggattataggcatgagccaccgctccgggtcaacaggggcaatttctgtcatatggtgtaaaagctaaacatctggcaaattcttaattttttccaagttggtaaaatcataacctactttagccagcccaatagttctaagggagtggctcaagataattagcaccacctcttggagaagcacagattcattgttctagtgcagggtttggtgcctcatcgtctttgtcaagtaagacaattaggacagcgatcagagatcaaggagctcgggatgatgtgcaaaatgtgatgcctatttatgcttgaataacaatttggatgaaaaaattggcatcttaaaaaaatatttgcatcatggttatattcctaaatgatgaatgaaagaaaagaagcatccagttctctctgcagttgcttccacctctaggcggtacttcatagcaccctgttctaagttaggctcagggactgagaatgcttttagcgaagagggataggaggggaggctaagatgggcaagtctgaaatgtgccctcctgttcaatggggggctttagagggaaagtggaaatgtcctaccagtaaccgtgtctgcagaggagacactaagctcttgcccaggccccatgggagtgcctgtgctgtcatcaccccaggggctctatctcagtgattccctccatcccgcccttttcctggcctcctctcctcctcttgggcttctccctctcccttccttcctccctctgaggcaatgcccagtgcttgtagaaagccccaccacttccaaaggactgtcccagcccctggggcctcagccccaggatccctagaggatgattttgtggggattaaaatgaaatgaggtatgggaaagagctggcgcacagcaaaccctccaaggtgagccccctccctattctgggctttcccctggacacccactctactggttgctagcgctgaggtaacaaagtaccacagcctggagggcttcaacaacagcaatgcattgtcttacaaatttggaggccagaagtctgagctaaaacagtcggcctggttgatttctgggagggcctctctccttggcatgtagaaggtcgccttctccctgtgttttcacatgtcttccctctgcatctctgtgtcctgatctcttctcctaaggacaccagtcccattagattgggtctcccccagtgacctcagtttaactgcatgacctacttagggaccctgcttccaaatgccctcacactgcgatactgggaccctgcttccaaatgcccccacactgtgatactgggaccctgcttccaaatgccctcacactgtgatactgggaccctgcttccaaatgccctcacactgtgatactggcggttgggacttcaacttacggatttggggtgggagcataaatcagcccataacaactggtcagtccctctcctctgcctcctccaactgtcacattgtaaaccccacctgactcttccccgacagtggccttggggagaaggcggggccggccagggtttctactcctgcctcatggagacccgcctcagatgcccagcactgcgactgctgcacagccacgaggctgagccgctgcggatgcatgcgtgacttaggaatgtgtgctggtgtgtttgccacagcaacaggatgaggaaagcacagctccaagagaggtgggagctcatccacctggggaagcatgagcaggagcaggaagggtcactctgggactgtgctcatgggaccctgagatgcagcagaaagagcagtgtgaggagcaaagtgacgctgcctgcaggtgctgtccactcagaccttcccagcctaggcttccctgctacccacgtcttcccacctggactccccctctctcaaggggcatcctcagtagtgctctctcagcccatctgcccctcagaggcctggacccctgccttgccctctgtggcttcacattaacattgactgggagccatcctacctggttctcatgcccaccagccttcctctccaccctgtggtcacaggactatgggcagcctctgctctgagctccctttgtacctctctcttctcacctttttgttgttgttaattgtcatgcacatcttgaagaaggaggaatgaaatgctcccagctctgaccaactctgtttttctaagtgtcctccttcgtggacctgactgagatggcactgctactctcactgtcacagccacccctcgacagcctgaggcacactccctgctgttcaggagcacccagattggggcatcggtgcacctggacttgctatgtctcgggcaccacccattacacttatcactttttctccatgagttatattcacagcggttccccaggcatcaaattggcaatatgagtttagctcttaggaccaaaggacacacaagagatcatttattctttgcatcactccccttttctcaggtaggacatcaatcttccccgactctgctctggccatatttactgccagtcgctgtcccttagactgtctgcctctcctagccttgacagatgagtctcactccaccaggatctttacaattcaaggcacagtccagcctcttgtagatgggaatcttgctaatgtagccactctagcttatcctggctgcatcatgagaaaaatggagttcagctcaggactggcttcctcggtttgcagagtcagtgggcacctgcaaactaagagcttccatctgcaaggaagacctatcaccccaagcacttggcttggctgctggctgacatttgatcatcagtacctttagtttgagtctctggtttctgtgaaataataacttctaatatccacacagtggagtacaatttacagaatgcatccatatatttaaaatatttaaactgatctataaacttcacagtcgatattatatccccctcattttatcaggaacataaaataagagactcattcaagctaaaacataaacgagtctggcctatggcagtgcaggctatttctgtctgttacagcaggctgccactctgcacttcatctcaggagaacagtttaaaaatagtagttcttttcaaatgggattgtgtttctggccctttcttggaagaggacctgaatgaaggattgaaagattcaaaggaaggagatttaggagtaacacagaagcaccatttaggtaaatgctagagaagaacacgatattacacatactttgcctgtccgccccccccacccaaacacacacagcctcaatgcgcaactttggcccacttatttttgcctcaccactctgttgttgctactagaatttttgatacttctgatactcaatggttttcaactgggcaccatctctgggggatattcgaatatgcatgagcccaccagaatgaccgcatggctctactggccccctgtggggaggggccaggaatgctgaacatcactgtggctagagcagggcacagtgttgaatccacctgaccaccatgacaatggtgtatccaatgagaaaacaaactagggagatgcatcagacttaggaagctccgccatctgttcgcaggatccctgagaaccctggctattctacctttcctgcacttctgcctattgatccttctttgaagatgcttttcttctttggtgcctatgtccttctcactcttgaaatgactcaactacagaaaatcctttccctggtacatgaacaagggctttctcctttaaattcctccttagtgtgtatttattcttcaaaatattttctagaccatttgagacccctcaggctgtcgatggcagagaatgtgctgtctgatgctcatccatcatcctcccttgtcagatctgtctaaccagtccttaggccctttaggcaaggccagtttcagtcctggtgggtgtaaagctgagtaattttctcaggcacacataatggtgaaataatgatgatcatagtcagaattatgattttggtaagtggagtatgctgtgttttccaaacgcttatttttcattatgtatagaatgaataatggaagacacattgagctcaggacccggatgttctgtctgcgtacgtttccttctaataacttgagagaagcattcttttatccagctcatgtcatgcatgtcaggctgggtgtgcatgtgactgagcagaggaccctagagctgcatatgtgtcatgccacctgaggtttaagttatataaattcttgggggaaaagatctggtttatatttaaaaaatgcttaaaaggctggagaaaaggatcagagagactgaacagcctctaaaaaatacaatttcagggagtcaagtacaaatgaatcagggacttttgactctgcatgtttcccaatataaaacatctgaaaaatggatttaaactagaaataaatgaccagatctaaggattctgatagagaaagaaaaaatgtgctaacatgcatgtgtgagcatgcatgtgaatgtgtctctaataagcttacattgcatgagcttacaattttgggtcggtatgcatgtccaaatgcaggatatgggtacacatgaaaagcaggaaaaacatagtgtgctgaggatttgtttggtgtatatgtgtctattttgaagaatatggaagaataattgaggctactcatttaataaacatttatgtggttcaagggtatgatatacattgtccctagagacaaaaattagtaaaatttcagtttctttatatgctttgtgaaaaataatctccttttacaaaactctttagtattgtgtgcagcgcacagagcctagtgtcagtgtttctctggggattgaagcagacagttctgccaaccagcatggatgggggaatagcctgggcaggatgcaagccacatcgtgcagaatatgattcttagtggaatagaaagccaagtgccatggaagccaagacacgtgcaggcttaccaagatgccccaagccattggagagaatatggagtttctcagtgcacagaagattcagaagatttacttaaacttaaagggcaagtagaccttaagaagctgtaaaacttgaggacatccaagattctgacatatgaaatataatttctttggcacctatggtataccatacactcttagctactaaacttagctactttttgaatgcatgtttctgtgcctgtatgttttaatgcatacatcaattcatgtatagaacaccacttgaactgaacggaatacacaatagtttcaccccaaaatatttcttttgttgccttcccatcttttaacctctattgtttagattggatactttttttctttctttctttttctttttttttgggacagagtttcgcttttgttgcccaggctggagtgcaatggcacgatcttggcccactgcaacctccagctcccgggttcaagcgattgtcctgcctcagcctcctgagtagctgggattacaggcgcccaccaccacgcccagctaattttttgtatttttagtagagacggggtttcaccatgttggccaggctggtcttgaactcctggcctcaggtgatccacccgcctcagcctcccaaagtgctgggattataggagtgagccaccatgcctggtgcgataatttctatttatctttaagtttactgactttttactctatcatctctattttgctattaaactgatccaattagtacctaaaactcagtcctagtttttcttacttgcttcttgtgtatggcttctagttctgtcttgagaatgtccaccatcatatttgttttaaaagtgttcacctttactttgcagggcatagttttagcagctgctttaagatctggcaatttgcaacaattctcagggatggtgtttgttaattgtcttttcccttgggaattatttagcttccccttgctctttgtaggatgagtaatttttgattatatagtgcacatttttatcttactagactctagattctgttaagatcctttgagaatatacaggcagagttcaccaactaagactctgggtggtggtttacacaagagttcagttctcaaagcctttggtgtactgtcctgggtgagttccacacaagttcagagtgaacctgggactttatacattgctatacctgattcctttcttgagctccttctctccgtgatttccccctgctctccagctcccatgagccccctttctttgccatctgcctagaaagcaggagtattagcaccatactccatcccctcaccccctgccataaccttaatgttacaaatttcttgtgactgagtccaactccagggaaaagtggtgagaagaaagagaagaaaaaatgtaataggtattcctctacacttttcagaccacagaggctcctgtactcagttccgctggtcatgaagtatttttttagagttttagatgtctttgtggccactgctgctactatcaccactgctgcaagactgcagcgtcagcactgaggtttacctcagggcagggtcgagggaaggaaagaaagtggacttccccggactctccgtcttacaagccttatctttccacatcctcagaccaaaaagagtttatccaagagtttttgtttgttttgttctgttttgttgttgttgtttctgttggcatttgctatacagttttaggattctggctgttctaagtttaagccaggaaaggaaggaggaaaataaacaacaggacatttgccgctatattgttctttcttcaagttttcatttccctccacaagcttcctgctattgtttaaccttcagagctctcatatatttcatttatgtatttttgtcagttataatgaatgggagagaaaggataagatgtagttaccccataataacttggactgcaagtcttatagagaattaaaaataatagcagtaagactgactaaaagatagtctgatttttttttttttattatcactgtacacatgtaattttaaacaccatcagtgagcagacatctcccactgccctgcccttggtaaatcactgatatggggaaattgggagccgggagtaataggaaatagggctaaagagtcagctatgtttgtcatgggttattaaagaacttaataaggacggtgtccttcattctggagttctaaatatgcattggatactgagcgtattgttttaatagaccctgtgcataaaagcatagatgaagaattaacattgacctagtaaattataaatttattgagagtgaggaacatatcagctttatttttgtgcatttattcattcaacaactatatattgtgtataactatatgctacagatacagaaatactatctctctttaatggacctttactctgaagggagagagagataaataacccatccattttaatataatgtaataagtgttaccatttttaaaaagcaccaagtagttaagatgtacagtgaattggggatgggggtgctatcccaggggatgtgcagaggttacagaaggattcttatacgagctgaacttaagctgtaacctgaaagaaagaaggcgacaacctgaaaaatagagtgtttccaggtggtagtatgacaaaagataagatgacgttcttctagaattatgagttgtttccgttagatctgaaccacatgtgggaaaatgtgaggaagaaatgataaggaaatagaggcattagatcacaatgggccgtataggaatttatgctgtgtttgggatgatggtatcgtatggcctggtatgtgagtatggatcagatgttgacgcctacctaatattattattgaataaaaattaaaatagataatatttgtaaataagttttataaatgtgaaagtccagcagacccctccagttgtccctaaagtatcaggtgatagaagtgtcagtgaacagaagaggatggattcaagatatactttagaggtagaattaataagacttggtgatggatttgatattggattcaggaagcgttaagtactgagtatgacttctacatttttttttgagaaatgtgactggtaaaggtgccatttatgaataagagaaaaactgaaggagaagaaaatttgaaggaagataaatctagaagaatttcatgtcggacatgtcaaatgtgggatgcctatgagacttccatgtgaccatggaattgcctatggaagtgtagggttcatggaagagaaatagggtgaagatataaatgtgtgagttattgccataaacctgaatgttcaaagccacagaataaatgatattgcctgggaaatcattgtacagtgagacaagaatacctagaacctagccctgaggagaagccaggaaaggagattttgaaggactatccagagaggtggttgggcagttaggagattatgacattatagaagccaagaaaagctcatttaaaggagtgagttgtcagctatgtatattgctgctgagaagtcttttaagaaaatgctaagatgtgtgccatgaatttggacacatggaagtcattcagtgactttggaatgggtaggttcggtggagaggtgtgaacagaagctggattggactggttgaagtgtgaatatgaggggaagaatctgagacagcacatttggacaactgttctgagaagcttgactgtgaaaagaggctgtggagcctggggtcagtggaaaacagtggtgttaaggcagacattagaaggtgtgaaaacaaccatgaaaatgatccagtacagcaaaagcaggtgaagattgaggagaaagtccaggtagctgatgaagggaattccttgaaaaagtgagaaagaaacaaatgcatagaacaaaaggaggaattggttttttgatagcgggaagggaagacatttgttagacagttactgtaaagtatgaatagaagtgaaggggttgaggatatttccccatgagagttgcagtgatgggtcatgaaatctaagttttctaaaatgtaggagataatgagatggcaagcacaaatgttggtctgtacatttgatcatgagaaaatgagtctgtctgacggcttctctattctccctcctccggcccctcccccacctcagtggagcaggagacaggatcctcagcagaggacagcgtggatggagggagagggtggtgaggcactgagaagttggaagagcatgaagaaggggaaaaatgaaccttgagagtgctcaagtgtccatggcagttatgagtgcctgcttgagacaggcacgtatgagtgtacggagaagccagtttgtttttttgatgttcctacagcagacacagaggagacagacatttagattcatctaggatggggttttgccaggctagtggaacaagggagggaggcgaaggagttgagagtattttccagggagagagaacaatgatgcgttataaaatataaattttatcaaaagggatgtaaaagtaaaaaaaaaaaaaaaaaaaaaaaaaactaaaaaatgttggatcgggggatttaaatccctagtgaagaaaaataattgttccctcaagcgactgaacaaagattttaaaaaggtaggaagttatggacagagtgagatgcttaaattaatgccttcagaggtggttcagtttctgacaagttttaggtgtgaatgtggagtaggtcacagaagacagcagagcaaaaagtcatggaggtaagatcaagaatatgaggggccggtttttgacggattgtacttctggacgaggaggtcacagagaatagtggtaggagtgaggatgcagatggagactctaagaagcaaaggtttttattgaatagaaaaaaataataaccaggaagtcagtagagaacagaaatgtgatggaagaggaagaggcaggggtgtaattatttagataatatgagccttaaagatgtaaggtttgaaaaagatggagcaagctcagaagtttaactggaaaacaaagacaccaaccaacaaaaaaatatgtgcggtatttaaaaattgggtagcccccacttgacaggacacgtctccaggagagcccatgtccccgcctgagtatgagagtgaggtggaggcatctctccaagaattggatgctgtcagggagcgttgatgatgcaggagaggttcctgagtgcagaatggaaggactgcaaaagggtggggaggatgtggagtgcagtccgatgaagggttatatgaaacagcgggtgtgagactacaggaaatcatagatgactggagatttacgcgtctacaggagaggtcagcaaactacagcctatgggccagattcagcctgcagcctcttttctgaatggcctgaaatgtaaggttttttttttttctttttacatttttaaataattgagtatcaatcaaaaggagaatactatgttgtaacacattaggattgtatgaaaccacaatttcattgtccaaaagtaaagtttttttggagtgaagccacactcactgatttatgtattgtctatgactgcttttgtgctacagtggcaagtttaacagttgctctagaggccgctcagcctgcaaagcctaaaacatgtattatactagttggtcttttatagaaaacgttggctgaccctattttacagaattggttatggaagtctcctggagacgagtggtaactggagctgataccagggtcttcaaagcaccatgggatgctacagtggtgtgcaggctagctgtccccacaggcatcataggaaagcatggttaaggctaacacctcccgaaggtgtcactatgacttcgagctttaatgagaacacggtagtcacaggagcaagcttctgatttacctaagcaactgaataattaccttcagcaatcatgtgtgttctggttactttctctgtttgacgtgcaattttatcatctgcttgtgctctctggctctctcacactcccctcgccttcccctcccctcattccttcatcccagttttttatcagctgctaactccattggttaatgcatgagctcctgtctgctcttgtactgtaccatggaaggtgccattcaagtcttagagtggaaattcgtcttctgaagttgagatttagaactgaaataaaaaataacttaaaactcatcagttaaggttgctagttttttcacgccaagatccagtaaaatgttcctttattttcccttggaattatcgggaaggaggagttactggggttgaagaagtctagaggaatgggaattaatgcaacttacatcgagcagttgaggacaggaggaggcaggaaggacagcactgtcaatggcaggcaaagcccttagtcctgagaccaagcaggtgcaggaaagtcacaggagcatgttgaggctcattttgtagtgatggcagcagttttttccttgcctgtcccaggaaggtagagagtttaatctcactccttgcaatcattccactactaattacagacagacagagctgaatggccaggctgattccactaagaaaaaattcaacctaattgatgatgacataagaaagctctctgagaccatttttattagggcacactgcatgccaaggaagcagggacattggctataagagcttttaactaagaatatttgtgaaggtggccaaacctggctcttctcttattaattccaggcctagcttgatgaaggctcttttagttccccttaagaaatatggaataaaattatttagccttaggagattttaagacatctcttcatgaatccagccctctctctctctctctgtctctctcacacacacaaacacacacacacacagacacacacgagaaagaaaaaccttaaaaaatatacccactgttttcttaaaggtcatcaaagggtgttctgaatcattgatatgattaacaattgatatgatataacgatatcataatgaattatgataggctagaacagccatcaaaagtctagtcagctagtttattcattcaacctttgcccacatgatcatgtggccccttctacgtgctaaacctgctatagatattggagatgtagaggtgcataacagagtcactgctctcttggaaattagagtccagtggggtaaacatatataaataaataacaataccgtgtgattagcaatgctagagaaacaaataaacaataataaactaggtggggaggaggcccggaagtttgaatgtgacgaaagggttcccagagcagtgattgctgggatagttttgaaggctgcatagacatttgaaggtggacaaaagagaagacaaacaggcacagatcaatacaatgcctcgtgttttaggaacttcactggtgtgtccagtgggtgtagggggaagtgagatggcaataaagaacccagagatgtaggcaagagccagctcatgggaaccttcacattccatgccacggagcaatgtggagcagtggtaggatttaagcagaggtgggactgactcttatttttggcaattattttggcaataaagaaaagaataaatgggaggcgtggagactcataaagaggatattgtaataatccagagtagataatgagggcctgaattaagacagtaacaatgatgaggaaaagaagagaatggatttggaagctgtaaagtgagtggaaacagcagggtttgttgattgaaggtgaggaataagggaaagagagcaagcaatgtaactcacttttatcttacgagaatggggattcgacaatgctgccaagagagatcagatgcaggagttaagagcagatgtaagggcaaggtggtgaattcagcctgcggtgtctgggaagcatacagagtaggcatttcacaggcagttatgggcctggagctcagcaggtcctccaggacggccatgcagatgtggagatcatgagcacagctggccatctacagtgctgagatggcatttaaaagaataggtttacctggggagggggtagaagtagtagaggagtgggccttatgtgatgctgttatttagggattgaatgtcccaaacttttcctatagtttgttccttctaacatttttaaaattatttcccacgtgttaatcattcttccatatgtttgcacaacttctctcatataattttcagacccaatatatgagtatttgagtcataaataaacagccacattttactaaggagggaactgaggcccagttatttcctcaaggctaccagttcctaagagacgtcgccatactgaggattcaggagttctgtgtttgtctgcttgttttaatacattgcattctacccaagacccaggtgtgtgtgtgcctatatttagattttatgtgaagtgaagtagaaaggcacagtagtagtgtgcccagtgaaagagtaaatcggctattcttttccttcccatacaccgtctttttatagatttcatgtaggtgaaaattccacctggcagtggaatgctaagaacagaggggcaaggcattcaaaagtaagtgggcagagcccatgcacgtgtttccagcaggatgatttggcctacctgctggaaagtagctatggtgcagaatagattttgagaaatgtttataaagactcatttttttccagtcaaaggctttaattaaatgttacaaatacaagggctttcagtcatgtctccctttctcctgaggcccaaacaatcctactccaataggcttcctgctcttctgtagaattgtgctgtggtttcccaagttattcccttctgcacatgggctggtgtctgccctctccatgccaattgaaaatacacagatggcacttccatcttgagtattcctggcaccttgtagttttctcccagaatctgatctgaatttattcattagattgtcttaactatagatttgaccccaccccaggttttctgctccctctgtcccccaagtggtccccttgtcattgaggttttgcttgataccatcactaataaatgggattcttcaggaaagcctgcgttttgctctgcatctgaggatgctgcttgcaaagggaaagcctggcttccctcctccttctatgtgcaagaagcctctagttcatcagccagtgggcatgggcctctgcaggaatgggcagagccctgcatcctccgtgcatttcaacttagctttggtgggaaaagactttcccccatttagtgaaaaaagaactccccagatcgatatatctattcttcaaaaggattatttataagttatttcacttcccatcctccacaaaatatttaatgaaacatacgtaaggctctgcttccccgtggagtgatgttcttttgcctatcatcatctacatttttgcgggctttttcttggcagacatgtgagttgacatggatttggttctgcaccatcactaggggatgatccagaggatcatagcaagggggtaccaagccgtgtgtgtcctgggctccttttacatccttttcagagagctgtagaatctcttcttaaggaaaacacacaccaatgcacgtatgcataatattatttcctggtattcaaaacccctgaggttaacagttccacaattctcagattaagaacccctgccctacaaaatgtattgatggctaaatcataggctgccctgcttcccaaggctgttgggatccaggtagtgaaggtgacttcttatctgatcctgagcacaatggtgtcaggagaaccttaaccctttaggagcctcttaagtcaatagaattcccttaaattaatctgggtgaggaattgaaagcaattaactccttcaaagttatcagcactcagtactggcttatatctccagtgatttagaaaaagggaaagcaaacagccaagatactgaggcaatatgacattgcggagtgctatatttatcccctatcaatgtctttcagatcaaattggctgagtttacaaatcaaaagctgatttatttttttatttttatttttttagcagccatcagctgcactactgcaaatacacagttcccagacatcaagctgcaaactctaaacacccagctgtgtgctttctgactttgatatcatcacgcgtaatagagggtctgcatgcagatttgagctgacaggcctcctgagaaggctcacagcagaagagcacccaactccagggccagcccagcttctgaagccacatctgcaaagaaaacccacgtcatgttgttatgggaagggatgggcctcagaaatgcacagggcctggctctgtggagtacaaagggttcactttcttataattacactttaagttgaagcttctctttaatatgaagctaattattattcccagatttccctatcaaaaaaaaattaagggaatttgtttctacgtatctataaaatgttatagttgatatatgcgtagctatgcatattcaaccatatacacatattcagttccaactatcaaatgagttcttaatatgtgtcaggatctatgataaatgttttgttgatattgatagacacatatatgtgtgtatacacacacacacacacacgaaatttatagttggcaccagtttgtataatatttttattgaatctatatttattgctttatgaaaaaatctggttaataaattaatttaagaactattcatggccaggtgcggtggctcacgcctgtaatcccagaactttgggaggccaagaagggtggatcatgaggtcaggaggtcgagaccatcctggctaacacaatgaaaccccgtctctactgaaaataaaaaaaattagctgggcgtggtggcaggcgcctgtagtcccagctactcaggaggctgaggcaggagaatattgtgaatccaggaggcagaacttgcagtgagctgagattgcgccactgcactccagcctgggtgacagagcgagactctgtctcaaaaaaacaaaacaaaacaaaacaaaaaatactattcatttgcatttctagcttatgcaaagggtatagtgaacatggaagttgtttgaggaagggaacatggtgcaaaagaaggtatggcaaggtggaggagcccaggaagaagcagtttctgtgtatccaacagaaagggtatcctgagagaaaggaggagataagtttcccaggtataaaagaagttcaggtgaagtaaataggaatctgagctgacaaagaggcaatgtcgtggggttgttgccatatgcatactctacgacttacgcacagctcacaagcggccagcatgggcctatttaagaatgctttctcttatatgatgggaaccacctatttagaacaattcagctgtcccatttcccagagttgggctctatgtttgttatcaactgtgtgaggtctgtcctgcagtgttacaacaggcaaacgtaggtttgagcccttcagaacttttcctatgaaacatcttttaaatttgcccatttttggcaagatcatcagattctcttttccgccagccatgctacctgtatccaaaggaaatgtcaaggaactatgtgtaatatatatgtacgtatattacatatatatatagatataaaatatatttatatccttttatttttagttctgaaaccagagacattttttaagctctcagcagttcttacctgggctatgcagctatacctgcttttttaaaataaatgatcatgagaaattatatttattatcaatcacatcctgttttaagtcaagagagtagagttttctagttaaaggatatgtggtgaatcctttgtaagatttattattattaagttcctactggcaaagcagaggtctgattattatttcatttctgagttgagatgttcttgtatcaaggatcatgtgtattaaaaatgtgataaagcctaattagggttgcagtaaaaataaagatcatgatagctacgatttcctgagagcttcctatatgctaagtactttactcatatttagtcatttaatgctcacaataatactataaggtaatcttatgttctccattttacagaagaggaatctgaagtgcacagaactgaactgtcagataatactgtctatagggctcgagtgcagaaatactagagctcatcactgcccccacagtgcagccgggggaagtggtgcttacagctgctatcaactcttcaaccattgctccagcctagtatcaggcctacagaagctatcctatgcagatcattcgacatgaatgtcacattgtggaaacactttttaacactgatggtttcaccctgttgcagcggatattgctgtgtgggttatgtgggtagctcccatgtccccagccttgtctagcttagcggcacagatttgcattaattccatattactgtgcctctcagcacccatctgcctgcctgggaccctccgtttacctcagaactggctctggtatttcttggagtccctgttacgtgcttaaatacaagtcttcttgtgccaccccctttgacagtctctcacatggcctctgctgccacttggagtggggctgtttttgagccttattgttctatgctttccagctcccaggactgcactgattcctcaagggggacctggtgtgaagaaggccttccccagttcatcagcaggccttgacaccagaactcacagtggcaccatacacctctgtattagtctgttctcacactgctataaggacatacccaagactggataatttataaagaaaagaggtttaatcgactcacagttcctcagggctggggaggcctcaggaacttacaatcagggcagaaggggaaataaacacgtccttcttcacaaggcagcaggaagaagagtgagtgcccagcgaagtgggaagctccttataaaaccatcagatcttgtgagaactaactcactatcatgagaacgggatgggggaaaccactcccatgattcaattatctccacctggtccctcccatgacatgtggggattatgggaactacaatgcaagatgagatttgggtagggacacagccaaacctctaaagtctttcatgaaaacagcttctttcctttctggccaagcccactttcttcatgagacctcaaaatcagttcctggggcttgcacatgttggtattgaggaagaggagtctcacctctgtctgtcttatctcccagcatctgagcaaaaccatgccttcatccagtcaaaacagaaaaccttgaatgttcatcagccatcataatggcactgggggaatacaactgtccttgaggtcagcctgggtttaacaggaacacctgatgcaacctgagatggtggagagagcagaggctgcagagctggtgcaggactggaatgtcactgctagtcatgggatatgggctaaattttaaaaatgattccttccaactctccaattctgggattctatgttctgtatctttttcaatttctgacgtccaaagattgtatctcagctggtatatatgccataaaaatattaagcaaggaggcagctgtgtcctctcctctccagtagctacagctgtactcctgacaagcttattcttgggtatgataaaaatgatcactgtgggtattattattttcagttataaagatttttaatgcccaatctatgaagtcagaaatgtgggattttcttttccaaagggatgttatgcacacaagacagtctctgtcattcgattagttgtaaatgctaagctcagcactttggacaacaccaaaacccctgtggggatttgggggcaggtgtgatcacatatccagcttgcttcatttccctgcttcggttgtcgtattccacttaatgaaatagctgtatttccaaaaagttggctgtaaaacaaatttctgttagataaatcatacttcttcattgatctacacttttaaattaaggatgccttctcctgaggaaataattggccccaaaactaaatataaattatactacacactcgataaaccttttaaaatcacatatttaaagaaaatcttttctgttagaacactaatagtgatgatatttcctaaagtcaggaaatacaatgatcatgctaagaactacgactgtacatggtgttcttttgggattggggccacaggagggttaggtgagcaacaaggggtctctgactttttttcattgaattcaacgtgttgttctgggtctgtcagccagaagttagtcaataagaagttggcaaattttaaaattatgtaaactggtttcctagctgtcttgagagccagagatgtccaagaacctggtttctgctgtcaaaggccttcaatcgcattggaaaaagaagccccctgtgtgcagcacaagacagctactcaaaaacttgattacagttgcaggagcagtggattggacatcaggaggcctggtgtgctccatcactgaccagatgtgtgcccacagactcctctaagcttcagtttcccacaagaaaaatacgaggcttgagcgaaatcactagttcccaaacttgcctatttgtgagaatttcctaggaagattatgcaagcacctcatcccaggagattctggtttagtgggtatgagtgggacctagaattctatattttaagcaactactctagtgaattctactgcagacagactatgtactagcagagcaactatggaattatataaccattcatgtccccttaagctctttaattctgttatgattttaaagactagatgaactgaatgtgcaacaatagtgcagaacagccagaggcaccaagagttaggagacaaaagggaatgtattagtgtcccaggactactgtgacaaggcacaaaaaactgggtgctttacaacaagaaaactgtacagtgctggaggctagaagtcaaaatcaagtgattggttggaccatgctctctctgacagtgacaggggagaaccctccctcgcctctcctggcttctggtatgcaccagcaattcctggcgttccttggctcctagaagcatcactcctatcacatggtcatcttcaccctgtgtgtcttcacactaccctttctctgtgcatgtctgcccgaatccctttttataaggacaccagtcagattagattagggtctaccataatacctcattttaacttaattacctttgtaaagacctttttccaaatatagtcactctctgaggtactgatggttaggatctcaacataccttttttgggaggacacaattgaacccataatagggtgtttgcaaggaagagttaaaatttgaaagaaaggtggtatttgcttagatagatagggcacagctttctaggtgacaaaaaaaaaaaaaaaaaaacaatctgtgaagaacaaatcatcatgttggtccaggatgagaactagcatggcctggcaggagagctgcagcagtggcagtggtggcgtggtataccagttgtttagactaagttctacagagggcttctcctgggcccctcagtgtccccactgcactccacgtgttgtctttcacagcaaccctagaagtaggtaacgttattctgattgtgcagatgaagatatggtggtacaggggagttaggtgacctaccccatcatgaaactagagggtagagaattggtttcttctgatcccaaacttttgcctcttaggacgatgatctgttgccttcttcatagcacttgtgcaaaataaacttgggtgaatagatcagggctactttgtggagggctttgataataagggagtagagtttgtgtttgatgtgacagaaaaataaggagccatttctagtgtctgaagaagtggaccatgatgaaggggtatttcaggaagatgagtgtgttatttccacctgaggatgcattttctttacagaaagaaaaagcagacttataatgagaagctgttgaccgtgaagtttcttttcatagggttatatcaagtggtttgcctcttccccactgatgtctcttaaccaagaatatccttcagcactttaaagactatgcttgctttttttttttttacccaatatgctttgtaagttcctcacactagtgataaagcactgatcacttcatagccacagcacaaatgcttttaaacgaaacttttcgttgatttattaactctagaaagtcagattgcagtttagtgttttggggggcttgtttgaggcatctcctttaggaacctgattttgggtggttcaaagtttattttgttatgtgtaaactgaccaactttctctctggttttgccatatatgcctctagtagagaaaaaggtgggtgaggagaaaagtgagcataatgacaatgaaagcttaaatttattaagcatattactatgtacaagtcactttttacatgccttacccaacttaatcaaaaagtgtacatgtaataactggtgagcaatgaagtcattgtgatttctctgggattgcacatttggtccagggaacataggaaagtaggattaagcctcactgttcctgcaggatgacttgaggaaaaatctcctttctctggaattagaaatttggatcagtagagaccatacgccttccccaaaacttgagccacccaacgtcctttcctacacaagatcacctgacataaatatacaaaactacacataaattaatgtggcacccatgtccccacagaaaactgatgagttctcgattttgactgccttaatatttgtgtaactgcatttcagtccaggactgtcatgcctccaacaggcctttccatttggatgtccatgacaagttggcccctgcaaatctcgctgtggccacaaaagagcatatttgaattatggaattgaaacagatgcatgaactttagctggagagcacaagagatccagagaacctctgtctttttgtttgtttccccgctttggtgatgtaatacacagcttcacaggagacctgaggtcctatcagtccctgctccgaccctggagctcaatccagaaacagctgtccagagctaatttatttcctaatgctgcggcactgttaatttataaattacactggtaattcgagctattattaatttcagatggtgtagggcaagcctaattaaaatatgacaccaattgccacacatatgtaccaaggactaccatttaaaattaatgggaatattaagtgtgacactggtctccgagatgcttggcacagtaattatagcattctggcaggggaagatctgacaaatgtaagcccgtggttggtagcaaataaacaaggacaacacaagaggaattacagattcttcatttaaagctcttctcaattcttccacccatcctcaaatcaaggttagtacctttcccctaaagatgcttatcaaacaatattcataaaggctactgagaccattagaagtgtcttactggtaggaactatgagtctatttgggttaatgttgtttgtcctcttcacatcctggtctttttggctgtgttttctacttatgaagaggttccttctttgtcttgtgaatttagtatctctttcttgtttgttgtaatggacataggctgttcttttcctcttctgtatgtaacagaggcaagaaaccgtctgtacatacatagtgtagtttgcatatggcatgaagatgtatgagatgaggccccggttgggcctactgctgggcagtggcacagacttatcatggccaaagagtgctgatcgaatggaacaaggcagtggcccttgttcacaagaccatggtcttgttgttgttgctgttgttattgttattgtggttatcttgacaaaacagtgacttcaacactgttatggaacacatacaatcatcccttacataccgcacacatcatcccttgttgtatcggttttttacagctactgttttcgtgctctgggccagcagaaacacgtggcattatggaagggttttctcacctggagagaaatgtccctttgttccctttcttgggccactcatgttaatacagtgctgcaccccctgaagctgtgcctccaaccagattataggagtaataactaaatcaacaggtgggcagcacacgagagttttggagtgctttcgtgcatgtgtgtgtgtgagtgtgtacatatatatgtaggcatgtttgtgtgttagtctaaatagccccgtgaccctgtgaggtattaggattgtatgtatattatgtttgggaaaatgcttctcaattgctagggacagccttatgcctgttgtctgctaataatcattaattactagcacctcatttccttttaaaggtatccaggtttaggatgctgtctttctaattaccctcatttaagagagaagggaggatagcttgggatgtaagccctaacttttgtttttcattgtcttttggcaaggaagcgaaggctcaggtgcctctgggagagaactttgaaatctcctctagccttaaatatcttggtctttcaataactgagtgctcatggccagacgtcaggcacagagtctggtatgtgaagcgttgttattattactcataatttttcactgaagacaatgagtcccgcaatgattaggggactgagtggattcgcagccacgtcgcctgatgaatctctgacatgcttacaactaggcatcgagtgcggagtcccattgctggtctgtctttaggatcttgtacctaggagctctagcagatcgaagtttagcacgttgatttctgcctatccaattaattgtctgagtcaaaaaacagaaaattaaattttttatgttagtgtttctgctacctttgtgatgcacgtgtgtgtgtgtatgtgtatgtagctgctggtgtggcattttcaattaatttatgctcaagtgtgcagtcataaattttatattcaaggctcagtctaagtgataccttgagatcagaaagagttaaggtgcctgactcagatcccagagcacgacggcttggtaagatacaggcagtgtaaatgtcaaaattattaatcacttattgggaccagtaattctctaggcactgtgctttgttcagttaggaacacaaacatttcagctgttccactggggagccaaggaaaagttggtggtgcggaggtgtagaagagacggaggagggataacccacacagttcctcagaatctgaacttacaactggcaaattatctgcagacataaccattttatactttgttttctaagtgaacatgtttggtcttttttttccttgtatttcaccacacgttaccggttttcccgcagcggttggctttgtgagtgaagacgaatacttggaaattcagggcatcaccagggagcagtcaggggactacgagtgcagtgcctccaatgacgtggccgcgcccgtggtacggagagtaaaggtcaccgtgaactgtaagtgttctcaccaccacgcgccctgcacgtgcatcaggctggcctgttgtcacagccaccacccagagcccattggcacagccagctactgacttagggtgggaagaatgcagcaccactttccacactctgctttcaggagcaaacatttcaaactcgagtttttgacacttcaaggtgtcacagtgtcacgctgaaagaaaaagtagctaaagtaactgaaaataatgccaaacttgacttgcatggctggcagatcattaaatggcattcagctcataattttttaaacacgtcttcaaatccaaaattttcccataatttactcacacaatacagttgtgctggagcctctcactgtctagaccagacatctccataatgggacaagaaaccatgtgctagagtgtatgaaggaagtttcaaacttccatttatggtatgtctattatatctcattattttacaattatagatgtgcatggtatacatacaaatagttacgatatagatcttagaggatgtaacaataaatttgcttgttactaatagagatacagaatccaaaaagtttggaaggtgctgtgtggacccctcattctcctttctcagccttccagattgtctctgacatcaatcctacttgaatttgctacctcctttcactcttttccctctgggtccctcattatgtaccttgccttagctccctacaacattctggaggttttctctgctgtgcacattccaggaagacttacgaagcaatagaactcaataactaaatcggcaaacgagatgacttcccttcaaaacttgggtggcgtggagttaggagaaggatactgtatctaggagaatatccagtctttcagatttaggtttgtgttacaatgtgaacccagtcaatatgaagcggtttaagaagcaaggcaataggtataaaaatgctgtcattttaaaaatcatatcacaagtttttacaaagggacttaagaggatttacagtttataaagatgaacttaaaacataaagaaacagaagcaaagaaaaaatacgcttaggaaaatgagtgaaagctaggaaaacctcagcacatgaaatattaccacaagactgctaggtgcaggtgcagaatttggctcagccttgctaaagcaaagagggaaacatcacctgctttaagatttatgttgtccataagataaaagcaaattagttgcttgggagaaacactgcttttcgtggtactgagaccctagagaaaattctcttcagggtctccacaaatagagcactttgggagagagtcagcaacatcatgtacaatatttctgcattaaatagaatagccagtttattgtggctgtttttcataataccctttaatataaactggtagaatgtgaagagtagtttggtaaagacgtcaaatgaatgcaaaccaagtgcgtaggcctagcttggtcacttgctctggtttgattcagggatctgttttagaataccaagaatgactgatctgtatatccttcaggcaattctccttgaatattatttcttgcaactgagcttttgatgggaattgaatagttcgaggttatatacttttggcaagaacctggtgtgcagaaattctagaaggctgattaaaggtgctgactgtcaacccgtggagtgtagggttgatgggctggcatcatcctatgaaagttaaaaagtttaaacagaaaaaatgcttgagtacatggtcatttcaactctgtacagaggagaacaaaagcagtacatgaaaggaagacccagctttttcttagagcggcatcaaaaaggtttttattctctggtacaatttatgtagcagttttaccttctaagtaagcagagccagggcagagactgagaaacaaaatcaacaaatgaagcagccttcttcattttaaaatgctgtagatcaggtgcagtgccctgtaatcccagcccttttggaggctgaggcgagcagatcacctgaggtcaggagttggagaccagcctggccaacatggtgaaaccccgtcgctgctaaaaatacaaaaattaggcaggcatggtgccgtgcacctgtaatcccaattacttgggaagctgatgcaggagaattgcttgaacccgggaggcagaacgtgcagtgagccaagatcatgccactgcattccagcctgagccacaagagcaagactccatctcaaaaaaaaaaaaaaaaaaggtgggggggcggctatgagacatcttctttttgcagatccaccatacatttcagaagccaagggtacaggtgtccccgtgggacaaaaggggacactgcagtgtgaagcctcagcagtcccctcagcagaattccagtggtacaaggatgacaaaaggtaaagcttccttctttcctatcccacccctacccccatctccaggagaaacttttccagggtcctgattccacattgttgcaaacgagttctataaaatcctcttctgaacttatctctatagggggcaaatgtgcaaagaagtcttttcttaacattaatggatttcagctacgtttttaatgtcaccatgtagaattatcactggccaaccaacagatctgaaaggtaactttttttaggaaggcaaaatcacaaaggaaaggccaccaggagcattgtaaggcctgtgaattttttataggccaagaacataatgtgttctgcctgaagctatttttaccacattctcaggcttgcgtaaaggagttaggaaggctctcagggccctgggagtggctaataagttagctgcagctagtaggtctcccctcctgttccagacactatcagtagcggtgtataagagtccatgacccaatttagccctccctttgtgcccaagttgttcttttactgtaggagaaaagagaagggactattcccttccttcccattgtcacagcatcctcgggatatttgttgtgagtcactgaagatgatcatttccaggctttatcaaatgacatatcagtgcagggatcagtagctcagtacagccaggcaccatggcaattgctgttatcaaagagccatttttaagggggatgaacaacgggaaatgggcaagagctgcctgtgttcagaacattttcattgaaaaagaggtggtggtataggggatgctagagagtcctgaggtgtatgtggggtggagtaagagcaaggagtgggggaggccaggaggctgagaaggaaaaacaatgaagagggcattctgagaaggagagcagcatgagaaactgcaggccaggagcaagtgaatggccgcccacgctgtgtgcacgtcttcagccagccttggctttgtttccttatgaggtcagtcagaaacctaaagctctttctagtctctagatcgaaaattgaattttgtttagaaccacgtcaatcagttttaagattcactgggttttatcataatcctcccaaatgaaaagcagtgttttgtttttttaaaaaaaaatttttaaggacacattctggcagcttctagtgagatgtattatattcatgtagcccattttacagatgaaagaactaagacacaaaggggaaaaacaaactcatgaagaaatagagctggctttccccttcttccaagaaagaagaatcaagcagactggagcgtgtttttctgataaatatggtttccttacttagaaattctgtttcacttatgcgtttcctcttcgaccttcttattgtactaagaagtaaactgaggcataaaaattaattattgaaccaaaccaaacaaaaaacctattgagctatggggtcagttcccaaatcttcaattgtctaggtcttaatgaaaagtcatcagctgcgtcctattattccaattctttattggagaaaaatagaaaaaatacatataagggaaagcaaaatcttagaggaaaataaagcaaaagtggccaatggcgagtaaaaggatgagagagctctcctctgtgcagcatctctggtcacaatagggacagctgtccctgccaccattcacccaggaggagagagcaggctggcagggccagggacagtcttcagaggcccctggctcaggcagctttgtttctgtctttctttcagttcttctgatggcctctccttttctcccctttccatttagtggtttagtcagttttcccttccctgcacatgtatttatttatttccagtgtgctggcatgagacaggggctgtctttcctcctggcacccagctcagctgcagcatccctgcctctgaggtcctggtcacagcaagttgggtctgccaggtaggtctcccaaggcatattgtgtctgccctggggggaaggccagctctagcccatctcccattttcagtgagatgagcagactaccaaggcagattaaaggaaactgtgtggtgaggacaggcagttttctcaagagttagttaggtgagaagtcttttggccacatgccagaatgactcaactgcacgctattgtatgtgttatccaacaaaggaagaggaatggaatgctatacctacggaaggccacccatccaacaggggcattgaccaatgaaaagtccacagctttggtaagaaactgaggcctggaagcagtgcgggatggaggggatgtgtgcccgcacagagaaggggaaagcgtgtcctcccaggagctgcaaagcctgcaaagtgctgctggccccctgtgctgtttttagctaaagacatttcagagctgtcaagcaggagcctactttcagttaagtctctccccactgcagagctgaaatctcattcacagtttggttatgatgggaaagcttcctccccatggtggacgaatggtgtcaaaacggccagtgggatcaatcagcctgacttgctcgcagaatcctcccggtgagtggtatggacagcaccccctagaggatcaatgtatacatagcaagctggaaatgtaaaagtggcctgtggctgcacagccggatgcctcattccatttggacagtgctagcattttaatgaagccgtggactcaggccagttcattgcccctagcgtttggagaggaaggctcccagaggaacatctacataatgaaaagcaaggcaagtctgtccaacctatcttctgacttccctggaggcagatgttgggtgagaactccggccagaacctgcctctcttttctgatcaaggttactgtaagttgcaggagtggagaaattattctgtaatcccacagagacaggtcttcagataatgacaaagcagctgcactctatgccaaaaaacactgtgacccagggatgggcaagagtcatctatgtctaactccatagaaatacattatactgatgccattgtgcggtccgcaaagcatttcctcatcattgtcaaacagccttgagtactgtttgtttttctcaatagcatccatttgccccaaagcatgtcccctgaatctgttccagtgtgctcccgccatgttattatctgcttgctacaagctgtgctccagccaggccctaaacaggaaacttagctttgtgtccatattccctgagatccttcatcaagaaggggttttttgccccaagagtattcatctttcccatagcatagaatcagcttcagggcaaggattacagattgtttgtttcagggaaaaagtaaaaggttggcttaaagctcattctaagaaatggacatttcggaatcttgcaaaggaaagtaggtggtatccatgatcgccataggaattgctgttaacaacttcctgagaaggaggacatgtgcctactgactccaatagcagctttctccttacccttttatctgcctggtaatagaatccatggttctaataagcatacctcacttcccccaactaactaactccctgtggcatttctgtagtggcccccagaccaatgcaagtccttgtggcttactgggctgccattgtggagctcagggagactgtcctggctctaaagggacatattcttgggaacctctaatccttccagactaatcctctataacagtctgggcagatcactcctcccaagcccttcagagtcccctgatgagaaaaatgagaaaatgatgatttttctcctcttcatagccaaaaaattaagtattatctatacaatgcaatgcttctggtgcttcaggagaaattagattaccaggtgctcgaaaaacatttttctttcaaattcctcaggtggctcttctctcagaagtttgagtttttcatttgcatggttgtcatcatcaccatcaccatcatcatcatcaggcccacacatttgaaccacctactgtgtgaatcgtattgctctgaatgccacacagctggcaggggttatttgttgtggtgttgctgtcagactacaaagcaaggatgagaggctagggagatcagatgttctggtaggagtgcccctgggcacatgtgtgaaaatcaagaaacaacgtgtcactcactgtctgtgaactactactacattatggtgtggttgagtggatcaaataatggttataatgatgtcagaaaggggggcaaggagaagaccaggaatccctgggcctatcttcttcctatgaggacacataaccatcttgttttcttcttttttgtcttttgtttctctcagactgattgaaggaaagaaaggggtgaaagtggaaaacagacctttcctctcaaaactcatcttcttcaatgtctctgaacatgactatgggaactacacttgcgtggcctccaacaagctgggccacaccaatgccagcatcatgctatttggtgagactgtgctctgagctgggcaagaagaggggagagggtgcagaacgggagagctgggtgggagggcccctcaaggccagggtcagaggttagcagggtatcagtggacatggagagggaggaaaaaaaagagagagacacagaaagaaatggagagagagggacagagagacagggaggaggcagacagaaagagaaagaacaagagatacagtttacatgtatacaaagtagtatatgtatagtacatgtataaaagtagatctcagaagtgggaaaaggaaaatgaaaaagaatgttcatgtttcattctataatggaaaagatcccgagataggagaaaaatactttggaatgccaaaaatgacatttgattttttttttctcagtgatgatggctcctaagctgactgtgggaatcataattgggtaaaatagtcaagaactcagaggggaatgtttgctatttcagtctttgcttactggcttagtgtaaaattttcctttttccaaaactgtctccagtcgctgggacatgaagagccccaccttcgtcacatatctggctactgtattgatatcagaagaaagtgagcgagctcccttgtaaaccctgatgcctgcccctgctagcagacagctgtgcagacatgagcctgccttcctggtggtgccaccaggcagggccctgggcctctcatgatggctccatcccttgatgaacgcagattctccctaaaggccacaggattaaattccggttgtgttttgggcaaattccttcataccccatcaagttctttgagcttgagatttttcaaacctgtctccccaatccctcatgttaacaagcactcttgaatgtgatggggaagtaaggggaggcatttgacagataatttgcaagaacacaaattccttatattctgaaaactttgggataatcccatggcccagccatgtgccctcggtgctagcgtatgtggcttgctctgaatcacgagcctgcactgcttcaccacacgatctctgctcacccattacatcctcctgcattctacccggcacaaatagtaaatcccagctttatctgagagagctgggaaggagaaagccgcccttgatccccgagccagtggcttggaatgggcagagctgtgatttgagtgattgatgtgtctggcatctctcacacagggatgatcataagagccccttgcatttttcatgcctttttgcctttttggcaggcgtctgtctgcatgaacagagaccaggattaggaaggaacagacccctccttcccttgctttgcaaatctaaatctaaggctccccctcagtttcccattaacccaagtcctgctctccacccacagcactcctcatcctcacaggggtagtcttccccccgccaccccccactttgacctactctctcctgacttggttgcatgaaatggttcagccattggctttatcatgattgtatacttccccggcttcttctccttaagccatctcaggatgagaatagggagaagcagcaaacaaacagttctcgtaagagttgaatagatgacatttatgacaaggaaagcagtgaagtgcaggtcataaatatgctcttttcagcaggcacacatgtagcaattacaatgtctacttcccatgccccccaccctatgggtctatcaatcagcatctgccctgtgcctcctttgggacgtttctaccattgccagctctctggcgtccagggttttctaaaaaggacatggaaaagtagtagtatgtattcaaatatgtttagaaagagtgggtcacaccaagatgagtggggtacatgtggggatgttctttaatgccagaagtcccggagccttaacatgctaaatctctaggggagaaaaagtttgcaggatgtttcaatcagaaaccaatttaatttgttagcttcagttgagagatcattcctgaggagtccatcactagcaatgctgcctgggtaacataattctgtggagctcgcaaaccccattcctgtgtgagatgagtatttgcagccaatagttcggatgttattgtggctcctaggttcattattgaggctcaccatcaatgaggtcttttgacaaatatgaatttgtttgtttgttagggaattttccatgtcagtttccattaaaagccaacaagcacacttggggcaggttggaaagcagcatgtactttttgcgaatatacaaacttcttgatgaagttagaaaggcagcaaaattatcatcattttgccaccaacttgtgcataaactgcacgctctctccaagtggcctagacgttgagaagtgaggaattctggtgcaagagaccatagtcggcggtctgggaatacttaagccaaacgggagcaggttagtccttcccatcacaagcacctgatcgctaaggtgacagggcttgcaggggcctctgagagttctgctcccgcactcctgaatcacagtgctctggggagctcgttcgttcctaccgtggtgccaggggcaaaaatttctgaatttggtgtcctaagatgaaacgatgggggtggggaagtgggaaacaagtctcatctggaaggaaactttagtcctttgttatccagttagtagcatggctcagcatgagctaagagtgaatccaactgcaccagaatatgtatggcgtaaccagctccctgccttcccagtcacggcattcaatatggaaacataaagcatgtcagcgtttctcttgccgcaccttgtcctacgcctttggtttctgtcttccttttttttatataatcccccagaaatgtctgtgaaaggcagtatacaaactatatatgacaaatatatagcactgtatataatatatgtgtttgttctcatttttctctcctgtgtgtccctcaaccgatttagaactaaatgagcctacgagctcaactttgttgcaaggtcagtatcttccttgctttatgttttgtctccccttccctctatcccagaggcccccttcccctgctgtgcattacccgaagcacttgtctgtaaagtgtcttagaggatgtggaaggctattgaaggaggtgattgattgggagccagggagacttcaagctccctttgctttgctcatcccttgctctcactcccccaggagggctgggaaggggaaagaaagaaagaaaagtatcgttaaattctcaatgcccagggatcagcacaaaggcaaagggtagagagtgagtctgggacccataggaagactacttcaactgactgagcagttttcataaaaagggtcttattgatgacccctcagcagcagagtcagacaccaagcacatgataattcagatattctgtcaaacgcatcaactggctcatgaggttctccaaaggaggaggataggcatggcactgcatgagtggttgccaatacacagtgatttctaggggtgctactggggtccaggttagggcctgacgtccagtagctctttggtcttgggtgactcactaagcctcatttagactcaatttcctcttctttacaatacagttgatctaccttatccaccgtacagagttgttccaacagtcaatggagaatgcatgttacaaaggctttgaaaactgtgaggtgcatgttgaatctccaggcataaactgaaagacaaggatgcccctcagtggaacatcatagggggtccttcactcatttctcagccccttctccacagtccctttacatcctcttccacttccagtcctcccctgcaaatatctcccgcgtctcttgcctgtctttgcacatcccttccaattttctcactagcctagagtgagtgactcattaagactatgactatgactaagcatccaagcaagcagtggaataaaatgggtgccgcgtgcactgctgtcaccctgaggacagtgctgaccacagcagtagcctttcaggaaggcagctgtgaagccagggaggggaatgcttctcccaccttccatcccaatcccctgacctcctctccccacctcaccccaccctgttcatcccctcacattctggccttgcaaactgtcatcagaggatggctgtagactttggaggtggagggggagatgaaaagaaatgcattacatgggaaggtgcatgacagatgaaaaaaagtacctttttatcatggaaagagtgagggctgcattactcactttagtgatgtacagcaccacagcgatgagccacaagcaagaaaatgaaacaaagaaatagaaaaagtgaagtcaatagacttattcagattcaacctatgattcaacttacgtttattgaacctccatgtgactgtattcacagacgtaaaatagagagcagtagaaaagtggctaacagctgaggagccaagatggccgaataggaacagctccagtctacagctcccagtgtgagcgacgcaaaagacaggtgatttctgcatttccaactgaggtaccgggttcatctcactggggagtgccagacagtaggtgcaggacagtgggtgcagctcaccgtgtgcgagccgaagcatggcaaggcatcgccttacctgggaagcacaaggggtcagggaattccctttcctagtcaaagaaagcagtgaccgtcggcacctggaaaatcgagtcactcccaccctaatactgtgcttttccaacgggcttaaaaaacggcacaccaagagattatatcccacacctggcttggagggtcctacacccacggagtctcactcattgctggcacagcagtccgaaatcaaactgcaaggcagcagcaaggctgggggaggggcgcctgccattgcctagttagttgtttgattaggtaaagcagctgggaagcacgaactgggtggagcccaccacagctccaggaggcctgcctgcctctgtaggctccacctctgggggcagagcacagacacaaaagacagcagtaacctctgcagacttaaatgtccctctcagacagctttgaagagagcagtggttctcccagcatgcagctggagatctgagaacaggcagactgcctcctccagtgggtccctgacccccgagtagcctaacgggaggcaccccccagtaggggcagactgacacctcacacagccgggtactcctctgagacaaacttccagaggaacaatcaggcagcagcatcagtggttcaccaatatcccctgttctgcagcctccgctgctgatacccaggcaaacagggtctggagtggacctctagcaaactccaacagacctgcagatgagggtcctgtctgttacaaggaaaactaacaaacagaaaggacatccacaccaaaaaccaatcagtacatcaccatcatcaaagaccaaaggtagataaaaccacaaagatgggataaaagccgcaagatggctgaataggaacagctctggtctacagctcccagcctgagcgacgcagaagatgggtgatttctgcatttccatctgaggtactgggttcatctcattaaggagtgccagacagtgggtgcaggtcagtgggtgcacgcaccatgcgcgagccaaagcagggcgaggcattgcctcactcgggaagtgcaagggatcagggagttccctttcctaatcaaagaaaagggtgacggatggcacctggaaaatcgggtcactcccacccgaatactgcgcttttccgacgggcttaaaaaacggcgcaccatgagattatatcccccagctggctcggagggtcctaccccacggagtctcgctgattgctagcacagcagtctgacatcaaactgcaaggtggcagtgaggctgggggaggggtgcccgccattgcccaggcttgcttaggtaaacaaagcagccagaaagctcgaactgggtggagcccaccacagctcaaggaggcctgcctgcctctgtaggctccacctctgggggcagggcacagacaaacaaaaagacagcagtaacctctgcagacttaaatgtccctgtctgacagctttgaagagagcagtggttctcccagtacgcagctggagatctgagaacgggcagactgcctcctcaagtgggtccctgacccctgacccccgagcagcctaactgggaggcaccccccagcagggccacactgacacctcacactgcagggtactccaacagacctgcagctgagggtcctgtctgttagaaggaaaactaacaaacagaaaggacatccacaccaaaaacccatctgtacatcaccatcatcaaagaccaaaagtagataaaaccacaaagatggggaaaaaacagaacagaaaaactggaaactctaaaaagctgagcgcctctcctcctccaaaggaatgcagctcctcaccagcaactgaacaaagctggacagagaatgactttgacgagctgagagaagacagcttcagacaatcaaattgctctgagctacgggaggacatttcaaaccaaaggcaaagaagttgaaaactttgaaaaaaatttagaagcatgtataactagaataaccaatacagagaagtgcttaaaggagctgatggaggtgaaaaccaaggctcgagaactacgtgaagaatgcagaagcctcaggagccgatgtgatcaactggaagaaagggtatcagcaatggaagatgaaatgaatgaaatgaagcgagaaggaaagtttagagaaaaaaagaataaaaagaaaccagcaaagcctccaagaaatatgggactatgtgaaaagaccaaatctacctctgattggtgtacctgaaagtgatgggaagaatggaaccaagttggaaaacattctgcagaatattatccaggagaatttccccaatctagcaaggcaggccaacattcagattcaggaaatacagagaatgccacaaagatactcctcgagaagagcaactccaagacacataattgtcagattcaccaaagttgaaatgaaggaaaaaatgttaagggcagccagagagaaaggtcgggttaccctcaaagggaagcccatcagactaacagcggatctctcggcagaaaccctacaagccagaagagagtgggggccaatattcaacattcttaaagaaaagaattttcaacccagaatttcatatccagccaaactaagcttcataagtgaaggagaaataaaatactttacagacaagcaaatgctgagagattttgtcaccaccaggcctgccctaaaagagctcctgaaggaagtgctaaacatggaaaggaacaactggtaccatccactgcaaaaacaggccaaaatgtaaagaccatcgagactaggaagaaactgcatcaactaacgagcaaaataaccagctaacatcataatgacaggatcaaattcacacataacactattaactttaaatgtaaatggactaaatgctacaattaaaagacacagactgacaaattggataaagagtcaagacccatcagtgtgctgtattcaggaaacccatctcatgtgcagagacacacataggctcaaaataaaaggatggaggaagatctaccaagcaaatggaaaagaaaaaaaggcaggggttgcaatcctagtctctgataaaacagactttaaaccaacaaagatcaaaagagacaaagaaggccattacataatggtaaagggatcaattcaacaagaagagctaactatcctaaatatatatgcacccaatacaggagcacccagattcataaagcaagtcctgagtgacctacaaagagacttagactcccacacattaataatgggagactttaacaccccactgtcaacattagacagatcaacgagacagaaagtcaacaaggatacccaggaattgaactcagctctgcaccaagcggacctaatagacatctacagaactctccaccccaaatcaacagaatatacattcttttcagcaccacaccacacctattccaaaattgaccacatagttggaagtaaagctctcctcagcaaatgtaaaagaacagaaattataacaaactatatctcagaccacagtgcaatcaaactagaactcaggattaagaatctcactcaaaaccactcaactacatggaaactgaacaacccgctcctgaatgactactgggtacataacgaaatgaaggcagaaataaagatgttctttgaaaccaatgagaacaaagacacaacataccagaatctctgggacgcattcaaagcagtgtgtagagggaaatttatagcactaaatgcccacaagagaaagcaggaaagatccaaaattgacaccctaacatcacaattaaaagaactagaaaagcaagagcaaacacattcaaaagctagcagaaggcaagaaataactaaaatcagagcagaactgaaggaaatagagacacaaaaaacccttcaaaaaattgatgaatccaggagctggttttttgaaaggatcaacaaaattgatagaccgctagcaagactaataaagaaaaaaagaagaatcaaatagacgcaataaaaaatgataaaggggatatcaccactgatcccacagaaatacaaactaccatcagagaatactacaaacacctctatgcaaataaactagaaaatctagaagaaatggataaattcctcgacacatacactctcccaagactaaaccaggaagaagttgaatctctgaatagaccaataacaggatctgaaattgcggcaataatcaatagcttaccaaccaaaaagagtccaggaccagatggattcacagccgaattctaccagaggtacaaggaggaactggtaccattccttctgaaattattctaatcaatagaaaaagagggaatcctccctaactcattttatgagtccagcatcattctgataccaaagctgggcagagacacaaccaaaaaagagaattttagaccaatatccttgatgaacattgatgcaaaatcctcaataaaatactggcaaactgaatccagcagcacatcaaaaagcttatccaccatgatcaagtgggcttcatccctgggatgcaaggctggttcaatatacacaaatcaataaatgtaatccagcatataaacagagccaaagacaaaaaccacatgattatctcaatagatgcagaaaaggcctttgacaaaattcaacaacccttcatgctaaaaactctcaataaattaggtattgatgggacatatttcaaaataataagagctatctatgacaaacccacagccaatatcatactgaatgggcaaaaactggaagcattccctttgaaaactggcacaagacagggatgccctctctcaccactcctattcaacatagtgttggaagttctggccagggcaatcaggcaggagaaggaaataaagggtattcaattaggaaaagaggaagtcaaattgtccctgtttgcagatgacatgactgtatatctagaaaaccccattgtctcagcccaaaatctccttaagctgataagcaacttcagcaaagtctcagggtacaaaatcaatgtgcaaaaatcacaagcattcctatacaccaacaacagacaaacagccaaatcatgagtgaactcccattcacaattgcttgaaagagaataaaatacctaggaatccaacttacaagggatgtgaaggacctcttcaaggagaactacaaaccactgctcaatgaaatcaaagaggatacaaacaaatggaagaacattccatgctcgtgggtaggaagaatcaatatcgtgaaaatggccatactgcccaaggtaatttacagattcaatgccatccccatcaagctaccaatgactttcttcacagaattggaaaaaaaactaaagttcatacggaaccaaaaaagagcctgcatcgccaagtcaatcctaagccaaaagaacaaagctggaggcatcacactacctgacttcaaactatactacaaggctacagtaaccaaaacagcatggtactggtaccaaaacagagatatagatcaatggaacagaacagagccctgagaaataatgccacatatctacaactatctgatctttgacaaacctgagaaaaacaagcaatggggaaaggattccctatttaataaatggtgctgggaaaactggctagccataagtagaaagctgaaactggatcccttccttacaccttacacaaaaatcaattcaagatggattaaagacttaaacgttagacctaaaaccataaaaaccctagaagaaaacctaggcattaccattcaggacataggcgtgggcaaggacttcatgtctaaaacaccaaaagcaatggcaacaaaagccaaaactgacaaataggatctaattaaactaaagagcttctgcacagcaaaagaaactaccatcagagtgaacaggcaacctacaaaatgggagaaaattttcgcaacctactcatctgacaaagggctaatatccagaatctacaatgaactcaaacaaatttacaagaaaaaaacaaccccatcaaaaagtgggcaaaggacatgaacagacacttctcaaaagaagagatttatgcagccaaaaaacacatgaataaatgctcaccatcactggccatcagagaaatgcaaatcaaaaccacagtgagataccatctcacaccagttagaatggcaatcattaaaatgtcaggaaacaacaggtgctggagaggatgtggagaaataggaacacttttacactgttggtgggactgtaaactagttcaaccattgtggaagtcagtgtggcgattcctcagggatctagaactggaaataccatttgacccagccatcccattactgggtatatacccaaaggactataaatcatgctgctataaagacacacgcacacatatgtttattgtggcactattcacaatagcaaagacttggaaccaacctaaatttccaacaacaatagactggattaagaaaatgtggcacatatacaccacggaatactatgcagccataaaaaatgatgagttcatgtcctttgtagggacatggatgaaactggaaaccatcattctcagcaaactatcgcaaggacaaaaaaccaaacaccgcgtgttctcactcataggtgggaattgaacaatgagaacacatggacacaggaaggggaacatcacacactggggactgttgtggggtggggggacgggggagggatagcattaggatatatacctaatgctaaatgacgagttaatgggtgcagcacaccaacatgtcacatgtatacatatgtaacaaacctgcacattgtgcacatgtaccctaaaacttaaagtaaaataataataaaataaaaaataaaaaaagtggctaacatacagtatcagggaagtgagagagcctagagcatggacatgcattgctatggctatgctttcagaaggaccgagctagttctgaccactgagatcttcattctcagaggaaattggagcttttgaaactcaggtaggggtttttaacaagagagtatttaacagaaggtgtactcaactcacagagagaacaccatcccatagcaaagtcaattgcaggaaaaccaaccagaaacacaaattgaaagcaaacaggttactttacctggtcactgagcaggggcaaggagcccccatctgctgagacaaagctgggctgctcacttctctcctgtgaactgatgactctggttggaaggctttctgtgccaacttgctactctgattcttcggatgtgctcagcccctcatctcagcaaccttcttgggtgtaggagaatgggtcagcgaagaagactgtggatatctaaaacgttatgacagttggattagtacagtcttcagtagagctgctagactcttgtacaatgagaaattatttagagaaaacagcccttgcacctgggctcatttactgcactgatgtgttcattcccccgcctcctttgctagtcttcgatacaatagagagctatgtattttctcaggaaatacgctccaagttatacttaccttacctcagaaataccaggaaagatttatatgaatgcatggatttccactgacagagtacacttggctttaagagaagttcaaagctattttgctaaccaatatctggatggactagaagtattttgataagagaatttcattcttcctcagcattttctgccaccattgaagtattttactgcttcccttctgcaaacaaaacagattgcatgtcacctctcctattaatatttggtggtgcaggactctcacggtgataaataaggactcaaggatgttccaccatccctcactgggcttctgcacagtaaactgtactcaggccactgtgcaaactcagcggctccgtggctgttcattttccacccactggtcctttgtcttttatctcctgggcattaagtcagatttgatggtatcagtgggctggtaaaggttgactgattaatgtctgtaaacctcaaagtgaccatcaaagcaatttattaaagaatggggactaaagtaaactctgtatatcagaaggaaacaattgcagcagaagagattattagttcttccctgcagaggattaaagacagttaattaggccaagtcatccagtggttaagcatttctatggtatatgtgtgtctagataacagaaagcacaaaagaaagaaaattccctcaccctcttgctagaaggtttgtatatccgtcttcacatgaaaccagccctcctctgcccactagagccagacaacagccctttgcttatctggacactcggattcagccaaactggctttgctggcaaaaatataactttctggattgagcagacattgaatattgacttagagatgggatgggagggttctttttactgttgttttcttcttgttgtattttctgtccccctctcccctttcctctctccctttcttccttcctgtctccctccctccctcccttccttccttccttccatcctttttcttcctttcttttcaacatattttcccaccctccctgacctgttgttaatataccattaacaaagagatcaattaaatttcagttgaagtcttggtgtggaaaacgcatgcttgacaagcttgaattttcagggattgtttatgttcctgatagtcaaaatgttactcaaagactggagtttgtggccaggactagctttggtggctcaagcaaggctcctgcttctggaagcaggacacaacacacactggacagaagcatgtcaagcatggcacagaggacagtgccagcatgtgcaccttctccttagtaccaaagcaaggggggtggactggaatgagcatgatgggtttagagtatatacgaaaatatcctggcatttccacctcattgtggcgggctagaagtgggatcaaaaggaccctctagttgactggaaaggttgaacaactgctacctggaaaagcccaaggatgagttctagctaaagtcaaggatgagcatcacattttctttacctatgtggacactaaaaagagttggccatctttcaagtagtgtgtgttggagatttagaggaagagaaaaaaaccccatctggatggaataattaagctgaggtttttttgggggggtctttgtttatagaaaacctcttttattttcagcaggaatttgtgctttcaatgcattcttctttctgatagtctcaactgccaggtgaaggctcttcctgtgtccttcctccagcacagtctgaaccagtacgcccatcactgtctggatgagccccccaaaactgcttgtggtttgggggtaaaagttttatgattactttatctccccaagtctgtctttagtctgtccttcctccttccagttatctttttttcttggcacagagaggatcaaaaatcaccggtacctaaataagacaattaatgaaaatagcccctccccctccttagcttctgaacttgtttctggggcccagcaagcccttcaagggaccatccttgttaaatgcacaggcaccatggcatcatcacccctggcttttccctaccgtcctgcagtacatcagatattttctcaatcacaaaacttttgatcgtcgataaaccctttccctctttgtaccttcagggtggcttctcagggccgctaatgcccacttaaatcaagagggatatcgtgtgtcaggtgattttaaagagtagattgaaggtgtgaatgcacaagtacgtattcatctgactttgagcaaatgttttagttgcttttaggatgagttatatctaggttgtctttctgtatgcgaggacctttgcacagagaacacagactcccaaggcatcactttgatgcaaaaagctttagtgccattttccgtcctctctgtatccagggtgaacgacaaagagggaagtaaaagattagagatcattccaaattcaggccaaacaaggcatctgctatccacagaaaaggtggagagactccataggttgttctgagagttgaagctggtgaaatggagacctttcacagcctaggcagcagagaggggccagcctcccagcatttctacagggaggtcccagcaagtgcaactgtagcagcacgggtgtgggtcagagccgcaggctgccccagagagatgaagccctgtgggaccagcttggtattgtccagctcatcaagaaaagtcaaatgtcaatggtttggtctcctctggtacatggaagctgactcaccagtgtttctaaatgcatagctaaatgccagttaaacttttgcatttcaaatacagcatgagcacctacattcaaatgctgtagtataaatccatatgtagcaatcaactttatacgtaagacctacaggcttcaactaattagaggatagcctgatgaccaaagaaagtaagttgttctacaaagcctatttggtttggtgtctcaggctccaaaggtgcagctgtgtcacctgctaaaatcaggcggacatcttggctctgcttccatctgtggtccaatctgactgtcgttcacatccttctccagccatctgctcacctcttgaggcaactggctgcccaagtaaaccagaaaaccagaggggggtcacataggagggctgggcagtggtcaggacagcaagggacatgggcaagaggcgcagggacgctgctgcgccaggagcgccagcttcttcctgaaatcatctgagggcaaagtgagcatctccgtctgctttcgaccttaacagtggcttgtttttaatttcttttagaagtgaaaactacagccctgaccccttggaaaggtttgtatatttttcagacagctgctgccttggtgggtgtggggtatgtaaaactcttcaccttcctcccagatgccttctttcctgagctaactccaggaagcagcgcagagggaaccctcccccaaccttcaaccatctccgtgtcaatttagattaaccccatcctcaaggacatccaatccttcctaggtagatcccacttgcagtagcctaacttctctttgctggtggcactaatgagcacctgtcagtgcccagaatagctccatctctgggctactctgcaccaggcctgcctctttcctcacacacggatgctctaatgcagcgatcttctcagaccttggccctgcatgctgcccttgcttgcaccattctttctatctctctaacttggagctggaagggaagtggcaaggggaggggaagatgggaggaagggggaggttcttgggtgagtcacttggctacgaataaaatgcatcttatttgaagctttcattcctgccagatgtttccgatggataattgacactcatcaccgttctctgggaccctaactgtcctggtaattagtctctttaggcctccgcagctctctaatgagatagaggcaataaaggcattcactgtggagtggaggcgtggctgaatgaagaatggaggcctcatctgcgtggcccatgtcactaggcagatgggctgagctgtagctctgaccagcactggctttgagagggccttgatcccagggtgctgtggtccacgcccacctggacctaaggtcttcatctcatctcatggaatccttccacatagcattcattcattcagtgtgggatggcctgcgggaagcagcccagtggcacgcctgcggttctcaccttttaacctgtacccaggtggagcaggccatgcagccacactctcttctctttattctctgaagatgcatctctgagatagtgggaagatagttgcatttgaagacagaagtcaagagacttgggaaagtcacttaagcttcctgaagttcagtttccacatggtagaaagggagataataattctcatctcctacatgagtgtcattaaggtgttgtgatagctttcccagtgcaagcgctctatctgaaatcctaactgacatggctttgcttctatgtagatagacactcagccacaggaattctcagtaagttgtattggatatagttagaaaaggggaggaaaggtatttggaagaggaaattgaggtaaggcagagggcaaggtatgaaaaaagtttttgttttattttttcttcaagtacaattttaagcaaaagtaaaacacaaagacaaataaatgtggatatgtcagcatgagtggcaatgccccctccttctttcaacaaacattggttgaatacctgccacgggccaatgagatacagactctgctcttaaggaacttactgcacagaggacagaggaggaaatacaaataagttaggcaaagagaattatgacacagggtggtaagtattttactagtgggatgtgtatggcactgagcaaggcagggaaggctgcctgcaagaggtgctgaaggctggaagaggagctggaatgaagaataagagtgatatgggtgagacatatttcggacggaggggagagtgtgtgagggtggggaaaaaagacccgcccctgtgtgctcacatgtggttatgtggcaaggggcaagggcaccaaactaggtgtggcaagaagagacaccaaggctgcagactgcaggcacatcacgaaatgtagtgctcggtccactgagaagctggacttggtgctagcctgttggcctcaaatcaatgaggatcatgatcgatttggggtagaaacatcaccttggaattcgcataaagaataaattccaggggtcaaggccacaggtggcaaggtccaattggtgaacatttttgggaattgaaagatgagatggtgcagagtatctcctttgggaggatgtctcatttgagagaatgcccctgcctcggggctacccctgtttccttctccttctgtccaacttggtccaggtctggtgtcctggatgtgctgctgaagagacaggttccgggggtggtgagcgcatgtacctgtggggtgggctgcgcagactggatatggtcacatagtgccagccactcaccagcctgagatggagatgatgatgatggagagcttcagaggggctgctcaggcttttcccagatatactacaagcaagagaatggctggcaggcacttggtggcctttttctgtcttccataggaagaattttctaacacaacaaacaggtgaggacacgactcgtctttacaagctctctgtggtgcttcccagcatggagcagatccacaaaagaactctgaggggcgtagcaaggagaccaaacacaggcacccagggagagcgcctggcatagccacagggccattgagatctgccacagggggtgtttgcccgctctcagtcgtctcccgagctgcagagtccccagcctggaaacaaggtttcagcattcccttacatggtaactacgccaggcccctgctgggctgaacacctggctgtggcattctcctccctggaggcttccactggcaggtcaggctgcaaggagggagttcagaagagaggagagaacacctcagtgcagggaagcggcacttgttttccatctcttacccagggcatcttcttagtcacagggagggagcgggagacgggaggtgggagtgtgcgggaattgaacaggaaatgggtttcaaagatgtgtgtggatgttcaggagagcacaagggatgaaagaggcagagcagtgtgctgacagctgtgtcccctgccgggagttaaggactccagtgtgcaggacacgtatggaattgtacggtgtgattcacgcatatgaagctatcttcatatgaatgtgaacactcacagtgttgaggcaaaacattcgacctggcttccataaaggcctgctgggccatatggactcagaaccacccttgtcgtctcagagtcctcagcctcgggcacagacaagggccttggttggaagaatcttggagttgcctagaggggaaggacttacgcagagcagagaaacatagtctctcacccttgaaggcatccggcggaggcttctctcctttgattccaaagaatgtgctctgtagatgacagagtgagcatctacaaagggggaacgtctggtgatggtttctgtggacacatagtagttagattctagaagacacaaccagttagtgaccgatcctaaatgacaagcatttctgggttgagatttaaatccgcaggagctttacaggagtgctccttggtcacctgtatcctagcacagatgcctttggttttgtgttttctccttaatgcagggtagagagaataagtatcccctgggcttctcagcatggggatctgcacctctgagaagttccggccttagggatactgtgaatcagacaccagggaaacatgaggttgatgacctattgcatttcaatctcatggctacctatttagccacgcccccaaattagggatttatcccaaaaggccaagacataaaatcatatgggcactgcctcctagccaggagttctagacttgatggaataatcccacatggaattgagaagcctgttttgattttgatttgttttagccagaaatgtatccaacgctgagcatccaagtcaggcaggcaggttctggctttgttccttgttccctaatccaggaagacatggacttagtgaggccaccagctttaaatacctctattaaattcaatgcaacagagtatgccagagcaggtccagtctgaggaggtggcctggttccttgagtagctaattcatctgggcatccaaacttatgtactctacagaaatcaaagctccactggtcatggggtttcttggccacaagggccgaggtagccagaaaacgtatgtttcagaacaatagggaagctgctggggaactgtactgccttgcagttctcctgcctcctgtgtttgtctccatctccatacactggggcaggttctgcatcccagtgtcctcattgatctccagttacatccacatgcacaggaaggcttcctgttcctttgtttgactcacctccatccatgtgggctggcttcggccttgcaggcatgtgatccttgagctgcatctgctcttaccccatccagatggggaagaggtcaagtgctccaggtggaacccaggtgccctgccctgagatagagtgattggcaggatggcctctgtgcccaaggaagcagaagcagcaggcagacacattgttttgtccaacaggttcttttctgagccacaggccaagcagctggagggtgggtgagtatttcaggcaggcagtgctcagaagtggatgggtgatgaggcactcagcacagtagtctgactttattaaagctctgtgtaggatattaatgaatctgccaccttcttcttgaatttgagcctgagccatggcctttgcatgttatgacacagtaaggaagaaggcccaggacactttaacctgagcctcatgttctctccttgcaggggaaggcttcccgttatctagtgtgtgtgtcttggggatgtgggccatagaacgttcacttctaatgctggggctggaacaccatgtgtttcacttagagggatgactcaccaggggcaaggccaaatgacagcagaccaggcaaccaccgggctttccttccattttctcccagaccactcacggcgagtgtgttctctccacaggtccaggcgccgtcagcgaggtgagcaacggcacgtcgaggagggcaggctgcgtctggctgctgcctcttctggtcttgcacctgcttctcaaattttgatgtgagtgccacttccccacccgggaaaggctgccgccaccaccaccaccaacacaacagcaatggcaacaccgacagcaaccaatcagatatatacaaatgaaattagaagaaacacagcctcatgggacagaaatttgagggaggggaacaaagaatactttggggggaaaaaagttttaaaaaagaaattgaaaattgccttgcagatatttaggtacaatggagttttcttttcccaaacgggaagaacacagcacacccggcttggacccactgcaagctgcatcgtgcaacctctttggtgccagtgtgggcaagggctcagcctctctgcccacagagtgcccccacgtggaacattctggagctggccatcccaaattcaatcagtccatagagacgaacagaatgagaccttccggcccaagcgtggcgctgcgggcactttggtagactgtgccaccacggcgtgtgttgtgaaacgtgaaataaaaagagcaagaaagaaaaaggaaacaaaataagaccgtctgacagcaacaacggtcccacaaacaagtcacaaaagataccgttaaacttttttttttttttatcattttactacatgaacatcatggataacaagggattctgattcattattaatttcattaattatattttctgatatgagtctagaacttactgcaaaaacaagacaaaactaaaaaaatacaactgagaagggtgaagagaagtatgtttgttaaacagtaaaaatgaatagtatacttcttaactaggtttacaactggtggaccacacaccaggcactaatcacctggtgaggatttggcatatccaccaaaaaatgcatccgatttaaccaacatctccaccagcgctacggactcctcccaattctgacatctcttgcagacaatactatgctctctacacactgtttagaaatggaaaggtgatctgcactgtatcttgggtttgttggctatgcttcctttgatgacatatattatacagtatatatatacatatattttttttgttagagttctagccattttatttctccgcagggtcctttctcagacattactgcatgctgtatatggcgttagctgtgtgttgatcttctaaaagatgatagagtttactggtaattgtgtaatcagctcctgcctttttattttcttgggttatttacatgtcagagacatttataaaaagtgaaaggataaaaaaaaaaaaaaacaactaataccgggcgcagcatctttccaggtgtggctctgcgctaggccaccccaggtggccccgctttctccattctgccctgtggcgttaacagacagcaagcagctgaacaagcagtaccgtcagtacccacttgctttagcccattatgggaatctctgatgcctttgtgaccactggagagtttaatcctcttggtttattttatttcccacctttgtgtgagtgtgtatgaaagagaagaaaatgcaatttttaggtaatcttttttttttttcccctcccctgaaagtctgggaacctgagagtcctcggggaggggtcctggatgtgatgagggaaagggggattgggggatccgggagggtggggttgtctctgacttgacattaaaaagtgttccatgtccctcttca

SEQ ID NO: 18 - DNA, 33911 bp, Homo sapiens
acagatgcaggggaaataaatgagaatcgtttttgagggagacctaaaactgtatcatcctagcccgaatctctcccttttaactgttctttatgtgtacattctgtgcccaaaagaaaacaacctttcattaattgggcaattgtccaggctcttagcttggcatccagctctcagagctgtgaaatcaaccgcaccagatctacgctttgaaatgaggcaacatctaactggaaactcgctcaaagtaaggaagtggatgagaagactcagggtcccttttctcttccccgtcttctctcagccacatctctcttatcctatcttggtgaagaagcttgcttggctaggagagaggtcagggacgagaagatagtgacgagaaagttccatgagactctcagaagtcccagcctgaacatcaaacctgaataaccaggagagacgtaacctcggcatactttcagtggtttacctcctgcccacgctgcaggtttttcaggtccttgctcgagtgtgtgctcataggcgtaaataaacgtgctatcagcagcctgcgtcagccagcccagctatttaagcaggctggcatcagcaaacacagcttccaaacccagggcttgcgcttgcctttgcctcttccacgtaagtacctttcaaaggtctgccttttatgcagaggaatgagtttgtgcaggaactagaccaaaatgctatcgttaccgtatttgctcatctgttggaaaacggtagaggtgaaagggagaataggaatgacaagcttacccccaagcagaagctaggaaatgctgctgggtgtaagacatcagtcccttacaaacaaaactgcatggggtcgaggggaatttggaggaaggggagttggtgttggtcttttggccaagcaggtgagatgtttttcttactcgcttctattttggaaagataactttgaaaccagcatttgtcagatgcctatgattttctcatttagaagcagattattgttattctacatcccagacttttatctaaaatcagacataatatcgttttaaaatatgttttgtgtttgacaaggggaagtgagggagctgtctctggatggagaagtggcttgattttgaatttgcagtttattgttacttctggttctcataatacttatttataacaacaaaaacagtgattttttttttttgagatgaaaaggaatcccaggctctggggtttagagaaagtataggtttgtgatatgtgagtggcatccaagtattcagggtaaactgttaagtaaagtggaataagaatcattgaataaaaaggtacaatctatcacatagttcagataagaagctcttaaagagaaaaggaatgcaaacagttcccatgaagtggcactgctactggacagggccctgtagtgtgtttagttaagtaaggttaagtataaccagggcaggcagagaacaaaacgaaggtgctggggaggtgggaagggaggagaagggaggagcagatagtaaaggatttataattaaacaacagattcatgaaaagcagataggaatagagcagggcattaattccatagtctatccctttgtatcaagaatctggtgaaagccaaggacctttctcaggtattcattcctcgcttcctgagcctccccttccaccccacaccccaacccacaccttgactctcactttctggactcctagaagtccacggacctaaatgaagctcatatgcttattattatttttttttaactgggctgaagctgccgactgaggaacctctccagaagtggtggcgagttaaaaaccttcaacgtggcaggcacttcttagccaccaaactgaagcttggttttaagttcatgaaggtcttatgtcaatcaagcaaataatgattaagggctatatctgagaaaagataagttgaaggccaagaggaagagaaaagaaaaaatggatcttgttctcaaagagcttgaaatctaaagtccagggagataattagatgttatgtccatgcacaaaataggatgtgttgagtgattacatttgtataaaatgatagaaaatgcaaactaatctatagcaaaaagaaagtggctgggtgcggtggcccacgcctgtaatcccagcactttgggaggccgaggtgagcggatcacttgaggtcaggagtttgagaccagcctggccaatatagtgaaaccccgtctctactaaaaatacaaaaattaggcgggcttggtggtgggcacctgtaatcccagctactcgggaggctgagacaggataattgcttgaacccgggaggcggaggttgcagtgagctgagattgtaccactgcgctccagcctgggcgacagagcaagattctgtcttaagaaaaaaaaaaaaaagaaagaaagaagatccatggttacttgggaaggtaggggcaggagaaaaaatgtttggggggactcccaaggtacacaggaaacttttgagggtgatggatatgttcattattgtgactgtgaccatttcttatatgggaagatttatcaaattgtgtactttaaacattcagtattatagctgattactcccaacaaacaatactttaaccacattatttttatttttatttttttgagataggatctcactctgtcacccaggctggagtgcagtagcacgatctcggctcactgcagcctctgcctcccaggctcaagcaatcctcccacctcagcctcccaagtagctgggaacacagacttgtgccaccacacccagctgtagagatggggttttgctatgttgcccaggctagtcccaaactcctgagctcaagcgatctgcctgccttggcctcccaaagtgctgggattacaggtgtgagccactgtgcctaaccaacaatataatttttaaataagtaaaagcatttctaaaaatcagcctatgtaacatgctgaacataaaagatgagtatttatggagaaaaaaataaattcagtaaagcacagagaccagacagtaaggatcatagacttttatagaactgggagggtccctggagataatctaacctagtggttgtggggcctggagaacttaaaaaagaaaaaaaaaatcagtgactggggcagggcatggtggctcatgcctgtaaccccagcactttgagaggctgaggcgggtggatcacctaaggtcaggagttcgagaccagcttgaccaacatggtgaaacctcatctttactaaaatacaaaaattattctgggcattgtggtgagcgcctgtaatcccagctacttgggaggctgaggcaggaaaatcgcttgaatctgggaggcagaggttgcagtgagcggagatcgtgccactgcactcctgcctgggtggcagagcaagactccgtctcaaaaaaaaaaaaaaaaaaaaaaaaatcagtgactaggccccaccctggaccaattaaatcagaatccccaggtgtgcagccctgggattggtttttaaagttccccaggtgagtctaatgtgcagctagggatgaaaaccagtgaaatcaaaaccattcacttgacagataaggacagtaagggccaaagagaggatggggatggccccatgccacctgaccaccaagtccgagagtaggatgaggcttgggaggctcagggaacacagcaacagaggctcaaaggtaaagaaagaggctgcttctggacactcccagctccagcgaggatagggtatccagcaccttccaagcgaatccttggaacccagacatgctgcggggcagcaaactagaagaattactcagggcctccaaggtgcattattaaaggattgtgctaatgagtgagaagggatgtttcaaaactaaagcttcctttttttcccgattaatatctggcataagtagaggattctaattattgaaaggaatcccagtgtacacactgggcactctgttctgggggacagccaagttgttctttcaagaaatagcatgtgtgcattcccagcactgggatgagtctatctggcagtccagggtcttttaattaggacttccaggtcaggcccaggcaaaagcatgagtgggtgaagtttgtcgttgtgacttctgtccttcctgtctgtggctccttagctctccctcagcacctgtatgggtgcaggtgtcagttcagaggtgtctgtgggaccacagagcctcaccggctccaccctggccatgtttccaattggtttttacctccccttcaatccaaatgtgccactttccaggtcttattctctcagggcttgttttctccatctctggaaaactaattaaaattaggatgttaatagacaataatcgtttaatgaattatgtcactccctggtatagtaagtaggttccagcaagataacatatctaggagttccttgaaatgttatatatagttaccatttgaatttttaagtggggcaatcaggcaaatcaaagttttatgcaaaatatgtgctccttattggtcagaattccaagcaacttgctgggcaaaaatataccaagattgtgggttttcagtataatttttcaaaccatatccagtaggcaaccatctataggttgtgggccctgttagattgttttttctaaattagtccattttttgtcaatgcagttgaactcatcagaagtagctgcatttcctgtgtctttctgaaaaatggagagccaccttaaggttactataatggagacaaaatgtcaagaaattctgctcataaggattttagaatattacctgcttctttctcaggagcagaaggctggcaccagcagagtagcttgcctagtattagtggccaggagcctcattctttggggacccagttgtgcagctggggcagcccccccaccccctcccagtgcatgtggccatgggcccattcgggcacttttgcccagtttgaaaaccagattgtggcagttcttgaaaacaagtggcagctgcctgtggccagtcctgtctctgaagaggggcgtggctgggtgtgtaattaacatcccttctggggaggcagtctgcaggcagtcggagcccagagcagccctgcagccagaggacacattgtgacagcagcagtggggaggagagggtgaaggcgagctccatcttgagtccctgggagccctggcactctagctctggggaacggattaggtcgttggcatcagggcagcagtcaacaccagtttaatgcccctacttggaagccaaatgctttttcctgtgctttttcctgttattcagagtttctccaaaataaaaaaaaaaagaaaagaaaaacaaatgacaagtttgcaagactgataaaacaggtttgtatgaccgatagaatttcttccttccttggatgacttttctttgaatatttctccttcaccttcatttccaaattctctcattacacaatgacttagttcaagaggtcacttggacattttttaaggctgtgttatgacctaactcagcttaatttctggatgttgttgatggcttccttagactttttgttgtttttgagacagagtctcactgtcacccaggctggagtacagtgtcatgatctcggctcactgcaccctccacctcccaggctcaagcaatcctcccacctcagcctctagagtagttgggaccacagacacacaccaccacacctggctaattttttgtagttttgatagagacagggtttcaccatgttgccaaggctggtcttgaactcctgagctcaaacgatctgtccaccttggcctcccaaaatgctgccattacaggcatgagccaccacacctggccagcttcctttgacttttaaaacatcaagtgaatagggacagtggacagtgctatagaaagatgacattgttggtagaaggatgacctatggcttggagtggtttataaagcagtaacctgcccttttaaaaaccatcacctggggatcctgaagcagcccctgctctgttctggaccatacccatcctgcccactcacttggggaacaggggaacaggtttgatagaggggcagcaagcctgatgctgcaaatggaaggctcatgtctcctggtgcaggaggtgcatgtatctgctgtcttcctgggcaagggccctaatgtgtttttggccttccagtgctgttgattttgaacacacagtgcaatacagcagatgcaggttaggctgtcctttttatttgctgggaaagtgcctacatctatcttttacaatatgctgaacaatcttccccagaactccaggctgagctatctcctgccaggggagcagaggacaggtctggtgagcaggaacctgggtcctattttctcagctgtaatggaattttgaagcagctgtgagcctgaaagattcattgtcccagtggaattattaatagcacctccttttactctaaaaaatacctggcctgagcaatgaactatatggttacctatgagtacaatctactttatgcaacagcataaagtgacttgcttggaatcttaggatgagcttgtatctgagctggctcttgaacccagtcagccccagtcctcattctgacctctgtgccaagtcatttactctccccgtgactcagggttcctgtgggaagcattgtatccctcccgccaaggctgagaactggtatatttatgttggctaaaccaaaaagaagttcagtataaatgtcgggcattcaaggaattgttcatcacaaggtcaggtgcttcagcctcttatttggccatgcttgggtagcaatagaagctcttttaaatgtagagaagttggctgggcatggtggtttgtgcctataatcccagcactttgcaaggcagaggtgggaggattgtttgagcctcatctctacattttttttttttttttttttagttagccagacatagtggcacacacttgtagttttagctacttgggagactgaggcgggaaggttgcttgagcccagaagttcgaggctgcagtgagctatgatcacgatgccactgtactccagtctgggcaacatagcaagaccccatctctaaaacaaacaaataaataaaaagtagagaagttaattttacccatctccacataatttcttgtaatttgcttctggtagttttgataaaatgtgaccaaacatgaaaacagtgccagacctttcacaaatgatctactctgtccttgtatgttcagaaagaaatgaaacaaaaacctgaggcagacattgatcagttctaatctcttagtgtatactgggcaggaaaccagtggcagtcattttggctgttaggtctagtcattccatctaggatcatgaggaaaatttcctaggattcttaaggtcatgacagatctgcttagatagtctagtcgttgttgatgtattttcacttcttccttgtggcttctccctaaggaaatgtacataaacaatcttccttagccctgatatctccatcaaccctttccagattttcagtttgctggtgccaggagtgaaatctgttttacaaaaaactttaattcagtggctaatatttaatttaataactaatgttggaagtatctatcactttattgtatatgccttaccctcttcctgggacatagactagcatctttggagatggctggaactgggatttatgaagcaggagggaagaaagcaggaggccacccctactttcattaatacactgtacctggctcagggttccacagctgaaaagggaggagagtccttggaactaactcaagagttaaacaatagttgactaaacaatagtaaaattagggctgggtgcagtggctcatgcctgtaatcccagcactttgggaggatgaggtggccggatcacctgaggtcaggagttcaagaccagcctggccaacatggtgaaaccccgtctctactaaaaatccaaaaattagatgggcatgttggtgcatgcctgtaatcccagctactcaggaggctgaggcaggaaaatcgcttgaacccgggaggcgaaggctgcagggagccaagatcacagcactgcactccagtctgggtgacagagcgagactacacacacacactcaaatcagatctataaggaacacagaaaggcctgatgttatttagcttggacaagagaaggctataaagccactgaatgatggtgttgaaaagcatggaaggatgtcgtggaggtcaataaccagctcttcatcttggcttttgaggaaaaaatccaagaccaaggattggtggggctgcagtataaaggacattaagtaagccatgaagtactcccctcattatacaaaaaatatagtggaaagaattaattacacagacaagctctgaaagatggggcagtccaccaatcttttattttttaaagcccttttttttgtttgtctttaggcgtatgatgagttaacatagtccttaattcatggcatacacaagaccccctcttaggttttatatctcattccatttctcctgctctcccactctccctcttttctctctttcttttcactgaacactataattttaagatgtatctatgttgttgatgatatttctaatgcattattatcaatagtctgttaattatatgtatcttttacttattgactcctgcagtaatggacatctttcttgcctccaattctctgaaatgatgctgtaatgaatattctcatatgtttgttctaccaccctttagatctggttcatgggaaacagaaagggaaaggagtgggctagaggttttatgttttattcacacagcatggaatattgaactgtccatgataaatggaggcataatgtaaccagttagtatttcaaacatttacaagcttctccatgttcccttgtactttaataagagattgagtgacaaataattttctagaactaaaagagcacaatcttcagtgatctccccttctcaatataattttcttttcttttttttattaaaaaaattttttttagccagtcaggctgggtgcggtggctcacacctgtaatcccagcactttgggaggctgaggcaggcagacaacccgagctcaggagttcgagaccagcctggccaacatggcaaaaacttgtctctactaaaaatacaaaaatagacaggtgagactccatctcaagtaataataataataattttttagccaatcaaatttagcagtgggtggttgcattcaatgtcatcttcttttctttctttcttttctttttttttttttaagacaaagttttgctctgtcgcccaggctggagtacagtggcatcatctcggctcactgcaacctccacttctcgggttcaagcgattcttgtccctcagcatccagagcagctgggattacaggcgtgtgccaccatgcctggctaatttttgtatttttagtagaggcggggtttctccatgttgcctaggctggtctggaactcctggcttcaagtgatcctcccacctcagcctcccaaagtgctgggattacaggcatgaaccactgtacccagccaaatgtcattttcttaaacttggctttataaattctagaagcattttatttctcgatattggttactgattacccagaaaaagcaaatgaaatgttctaagaaatcttattagtcatgaggttgagtgaagtttctaaaatgttttgccattttaatgattgcaaaacctgatgtcattttgttgcccaattatatcctgagtcactgggaaagctagattagaaccttaataatggtaccttgtatttatgtagtgttgataatttatagtgccattcataaacataatccatctcatggaatcctacaacattgtgtgacaggtggggcaggttaatagcttcaatagtagatgatgaaatggacgtctaaagcaattaagacagttgtccaaagttacctggagactatgtgatagagctggaaggagactccgggtcttctgaagcttcactcaatctctttctgcagtatcacggctgatgctcagaaaagtgatctattgtaggttcaaagctgtcccctgagctggacattctggtgtatctgtccttttcaattatttcgtgatgttaatgagctggctaaagctgcacaccctctgtttgtcctattagctgaacacctgctcataaaaaccactcaactggggaaaaaaatcaggtccatatcactgagtagcatggcaacaagcagcatgggtggttggactttggcataatttggagctctgcaaggtaccagctgtgggtcattttatccatgacctaattatagtcataaaataagaatggtagttggaccataaaaataataatctattaatatatatttatgcaaagagataattccattctgtcaaagactcttttctggacttttcaaaatacacaactaacctgaggaagttctgtctgcttgcagtagacagtctaatggcctaaggaaaggcatgtgattgggcagcctgaaaatctacccatggtgcatgtgcaacaccacacaggtctctgatgtatcttactatgtaatttgagctcaggcaaaaataccgtagaacccagcatatattttcaaaaaaaccaatcatgatgtcacatccccagaattacaaatgaacagctcttttcagagtcaggcattaggaatgagaacatttttagaaagaacattttaatgttctaaagtgattggatgtctacagagcaatatgacaattttatctacttgattctccattgtatgtgtagcttatctgtatttgattttttttttttttcacccaggctggagtgcaacggcacaatctcggctcattgcaacctccgcctcccgggttcaagcgattctcctacctcagcctcccgagtagctgagattgcaggcacctgccatcatgcctggctaatttttgtatttttagtacagccagggtttcaccatgttggtcaggctggtctcgaactcctgacctcaagtaatccgctcgcctcagcctcccaaagtgctgggattacaggcgtgagccactacgcccggcctgtattagatttttttaaactaccaaactgatttctatcatcatttaagcttttgagcacccttcctcttccgtgcaacaaatacatctctctatccttcagcgtattgacctaattaatctaattaatgttctcctaaacaaaagaagttaaatgggcaatcaaaaattaataacgtactccaaaacataaaaggaatatttattagctgccatttaaacttatttgagccatttttcctctctgcaaactatttagaaagttgatccttttgttatttgcttccaagcttagtagtacacatttctcttctggtttaaaggttctctttagaaaatattgagacattttcccatatcagaattctatttgcctcatttcttggtgtattaggacattagacattttcaaagagatttgataatacaatttgtttgacaaatctgaccccttctctattacctggtttgaaaagccctgagtgcgtggctgtgccccatggaaatctctaggacaagccgtttttgtttctctgtttatatttgatcataggattgactctgttggagatgtaatggatattcacacttactaagcattagcacaaccatattgacaataaccaaagcaggcagaggcccaagcataactcagtctaccagacagattcctatcctacatattcaagttgcaataaaaatgaaagatcaggaaatttgaagctattttcctcttgcctttaaccacagagctgcaacactatgcatttttaagagtgaaagacagcctcctgttcatcactgtggttaagtatatgttgttctttcctccagcatcctaacagacctgcattttgcttatccctaacagcaacagtgatacctaggtgcaaccggggcatttttactattctctacctaagtgagaaatttaacattttatgtataataaggggacccgatatccaggtttgcctggaactcttctgatgtatgcctgttgtactggtgttattattattattattattattattattattattattattattttgagacagagtcctgctctatcacccgggttggagtgcagtggtgtgatcttggctcactacaatctctgcctcctgggttcaagtaattctcctgcctcagcctcctgagtagctgggactacaggcccccaccacctcatctggctaatttttgtacttttagtagagatggggttttgccatgttggccaggctgctcttgaactcctgacctcaggtgatccacctgcctcggcctcccctggtgtaattattaatagcactccttttattcttcagtgttctaggttaggtgacaaattatatgatcacattaactcaacagccaggttgaatactaagaagctccttggttcctagtgtttcatgggttcctccgttgtcccttgaagtagaaactaggcacaaagtgttcagcaaatcaggagcagagcctagaataggcctctgtgttcttctttcttgagtcagcgacatcagcaaactgttgatgaggaagaacatgatcacttaaaacctaggccactctgactgtcagaatttgagaagagaaactccctcagaagtcatctggcccacaccttcacttttctagattaagaaataagtataacacttcgggaaatgcatatgccgttttacactagaaaagtgcaaggttgtttcatgagcataatctcactggatcacaactggagtaaagaggcaaggaaggacattcttagccacattttacagagaagagaactaggttttaaataagttaaataaagcagccaaggatatgtgagtatgaagtggaggcgttagaaatgaaatccagccctgactccacacccagtgcccatcctatgactccataccagtttaatattttcattcattagtgaggatttaaagtgtatttcctacatataatttatccattacagatacacaaacattccctctgcaactagtgctatatactcaaaagtatcttctttcagagccaggcataatggctcagaccggcaatttcaatgacttggaaggatcgcttgaggccaggagttcaagaccagcctgggcaacacggcaaggccccatctctaaaaaaactaaaaaaagaacagacacattatttctgcttctctatcttcccacatgccaagagctctggccagcaactaaactgttcctgcctgacagcaccacttggtggttgggtagggaaatgaaaggccaaaatctttctatctccattcttgtgccttgggtagaaggatgaggagaagaaaatgcaaagtaactcctgctttttctttattgttcacagttaacaacattaatcatttctcaaacaacctatttctcacactgatatttccattctcctttgttcgctttctttatttcatctatgacacaagtatataaatataatcagtttggccgcgtgtggtggcttactcctgttaatctcagcactttgggaggccaaggcggttggatcacctgaggtcaggagttcgagaccagtctggccaacatggcaaaaccccgactctactaaaaatacaaaaattagctgggtatggtggtgggcgcctgcagtcccagttacttaggaggctgaggcacaagaatcacttgaaactgggaggcggaggttgcagtgagccgagatcgcaccactgcactccagcctggatgacagagtgagactccatcttgaaattattaataattacaccagtacaacaggcgtacatcagaagtgtcccaggcaaacctggatatcgggtccctttattatacataaaatgttaaatttctcacttaggtagagaatagtaaaaatgctcctgttgaacctaggtatcactgctgctattagggattagcaaaatgcaggtctgttaggatgctggaggaaaggaaaacatatacttaactacagtgatgaacaggaggctgtttttcactcttaaaaatgcatagtgttgcagctctgtggttaaaggcaagaggaaacattttagcttcaaatttcccaatctttcatttttattgcaacttgaatatgtaggataggaatctgtctggtagactgagttatgcttgggcctctgcctgctttggttattgtcaatacggttgtgctaatgcttagtaagtgtgaatatccattacatctccaacagagtcagtcctgtgatcaaatataaacagagaaaaaaaaacagtttgtcctagagatttctatggggcacagccatgcactcagggcttttcaaactggataatagagaagaggctagatttgtcaaacaaattgaattatcaaatctctttgaaaatgtctaacgtcctaaaacaccaagaaatgaggcaaatagatttccgatattgggggaaaatatcagtgttttctaaagagaaccttatgcttttatgtcaagataaaggaaagtcatacttcttgaagggaagatgaaattcaatcaacatgcatttaatagatattcactgagtacctaccaatgtttcaatgacaattctggatacctggacacgttgaagttgtgctataaatctgtacagtcctcaacagttccttgaaaccctcttcaatatctgcaccaaaacctcatttccctaagcaagattttaattaaaactgaattttcttaagtattttcttttaaataacttattaaatttcaccaggatatttcaataggattattttatacttttttccattacagatatatagcagtttagtatctatgaaacctttagtgggttagcctgggatcttatctacacacttacaatattctttctcgggaaaactttttctgaattcataacaatcatcatagagttagactagacctttagaaaagcaacctgtttacaaaatggagatctatatggaaattatggaaatggaattgctttcttctgtttgcccatttatttctatgaaagtagactaaatactccacttatttcatagcacattcaaagaagaagcctaagttttatgagcatctttcactgtttccccaggtttccacatacaagattagaacacgaattgggctatcagtgaaaagaactcagggcatatgcagagttttatgtccagggttgactaatgattcattcactgctggaagtcattcacagacaccctttcctccaatggcttttcataatatcttcctgttttcagtaagcggctacagaaagtctggactactgagagacttgtttcaacaacagtttcaggatgatccttaattctacaaaactctgtacctctagggattaagtggcagcaatcatcactgagctccagctggtctggttgaagccagcctttctattctatcagatgctgtaacgtttcttgtttgtattctatattactcacataatgccatctttcaatgatgtctgcatcaattgaagaagagcgtgtggggaaggaaagccagcctggctggtagtgccggtggttttaactgaaatcactggctaatccattgagctagggcagagccatgtctggtcaccaacactgagaaatacgccacagggagggaagtactcagactggccccaacccacagggagccagagcagacaccgggcactgcctttcttctgttcctcgagcccacctggctctactgcccctttcaccacaacttcccatcaaggatctgctgtctgcagaactgttcggtgcaaagaggaaagatggtgtagtgattaagagcatggatgcagaagttagattttctgggttggatctgtgctctgtcacatactagatttgtgatttggaggaagtaatatccatctccttgggaagggtatataagtttccatctatataagtttctacatatataaaatgaaaacaataagaacacatagtgttgctgctcctctgatgataaagtgaatgaatgcatctaaggcacttagacaggacctggcacacagtaattattcaacaaatatgttgtcactattgttataataacagaggtgaggtttctgtaggtgattcagcaataggaatcaactctatgttgtttgggggcactgaggatgatatcaaaaggctagagtgttattttctccaattttacattttggctagtccttgttgaacacagagcagttttttccaaagttatgtcctaaatcaagtcatgtcaaatgccattgtttaggttctgttcaacagccatccaatgagcacatattaagtgccagactctcctaatgaacactggggagatttaaatgtatgagaaatgacacatcccccatagaagtgcatataatttactggagaagacaggcttatgaacaaattatttcaaaacaatttcagccaggcatggtgcctcatgcctataatcccagcactttgggaggccaaggcatgaggactgtgctgagctcaggagtttgagaccagcctgggtaacatagcgagatcccatctctactaaaaataaagaaaatcagctgggcgtcggggtgcttacgtgtagtcccgcctactcaggaggctgaggtgagaagatcgcttgagccctgcagttgaggctgcagtgagccatgattgggccattgcattccagcctgggtgacagagcaagaccctgtctccaaaaaacaaaacaaagaatttccatttggtcattactctcataggccatgacaatctcaaaaaagtgactcaccaattcataaaatatttgttcctccttgttatcaccttcctcactactcatcttctgtcctatttatgcctcctcattaatagatgagaggagaggaggaactggggaatggtggtgaggaaggagcagagaaataattattttagtgaaaatgctaacaactaagtataaaccaatgcacagtgtacaagtgcataatgagaaaacatgcttaagatatcacatccctccctgccatgccattcttgagaagtgccatgtagggatacatgttatgataaagcaaatatacagcattggatttttttttaaggggtctaatttcaaccattgtgctttaccgttccagaaagataagagattgtaacccagaagaagtgaagtttataagctcttcttactggtttgccatccaggggatactttacggaaagcctagctcatagctatttaatagtaatatcaggctgggcatggtggctcacgcctgtaatcccagcagtttgggaggctgaggtgggtggataacttgaggctaggaatttgagaccagcctggtcaacatggcaaaacactgtctctactaaaaaaaaaaaaaaaaaattagccaggcatggtagcacacgtctgtaatcccagctactagggaggctgaggcaggagaattgcttgaacctgggaggtggaagttttggtgagctgagatcacgcctctgcactccaacctgggcaatagtgtgagactccatctcaaaaaaaaaaaagaatcttccaagcaagcactttacagttgagagacatgttccctataataacatcataagaactttaccataaagctgtgaactaggcaaaggtagacattattatattccttctttacataaatgaaatggaggctcagcaaagtgacatttcaaataattagtacagaagacttctcattatttgaacttttttctacattaattccaatttcattttgttcttaattttgccatgtttctaaaacagagtggttcctaaggcaagaggaaagccaacctagaagggaggacctgggaaatagcaagctggtttagcaactacacagagcacctacaaaggcacacatcaggcagggcgcggtggctcacgcctgtaatcccagcactttgggaggccgaggctggcggatcatgaggtcaggagttcatcaccagcctggccaacatagtgaaacctcgtttctactcaaaatacaaaaaattagtcgggcgtggtggcaggtgcctgtaatcctaactaatcaggagtctgaggaaggagaattgcttgaatctgggaggcggaggttgcagcaaactgagattgtgccactgcacaccagcctgtgggacagtgcgagactctgtctaaaaaccaaaaaaggcacacatcatatatgcagaactgaaaaatttcaaaaggcagcacttcgtatttttaagagatggactaattactgagatatataccatcaaaaaccaaacctgatgacaccttgactcgacaaaacttgcaggaataagaggtacctaggagggtgtggtcactggtgaccagtgggaatggcatgaattcaagtatagctgtcatctcagtcttcctgcctcatcaagtcaagtgcagcgtgttctaggagaacagcatgcttgcttgtcctgatagcaagtggttctgcttgtacctgtaattgttacatggggtcaaaagttaagagctcagactttacagaacaaaggaacaacctgcccaaatcatctgcatttcaatttactcttgtgaaaaatggaatcagaacaaaacttgaaaggagagatcccattatctttattgcctaatgtcaagtaggtgttagggctttttaaagagatgcatggaagtctgaaagaatgtcaccccagtagccaagtaatgaagcaggaaaaggttgaaaatggcctatatcccacagtgggaaagaaaagacaggctgccttcagccccaactcttaactaaagggacagaggatgatcaagttagagcttaaatattcaaataggtgatttggtgatatcttagaacctctgacatcaatagagcataagaaagatatatttgggggccaggcacagtggctcatgcctgtaatcccagcactttgggaggcggaggcgggcagatcacttgaggttaggagttccagaccagcctggccaacatggcaaaactccatctctactaaaaatacaaaaattagcaaggtgtggtggtgtgcacttgtaatctcagctggggaggctgaagtaggagaatcgcttgaacccggggggcggaggttgcagtgagccaagatcacaccactgcactccagccggagcaacagaatgagactccgtctaaaaaaaaaaaaaagaagaaagaaagaaagaaagaaagaaaataatacatttggacgaatgaatcaatcttgatgctcatgaaatcaacagcctttactgctatagccagaataaaaggtagaattctgagtcttcctctgatgctgtagacaatttaactctttttaaaaaacctcaaaatagaactaactccattctgatttctaagagagaattgtgaaagaaatgaaaataactaatatcaaactgcttttgaactggcacttagctgtttaaacatgtaagcgcattatttcagtttacatggatatcctattttaaacccacagcctaacagctttctgtccatctttcttttacactttcttttcatttttcttttatactttccatctctcccttatttcttcttctttaattggtcattttcaatctatctctgtggttttcatttggagactttgatatttacttttgtgggagggaccaataattaataaggctaacatattttaaagcacaaaatcaaatcctgactcccaggagttctgtagaggagaaaatggtaacgtttttagcatgatacagacaaagggtcttagtaattagttttccatacattatatttgtattgttcttggtgaccaatggaaataactgggctagcctggaaacagagtccataactctcacaaaataactcaactctccttttgggctgcaacaggaaatatttttacacagtaaacagtaaacatgtggaaacttttagccccaagatgtcatgcaggctgaaaacataaatagcttcaagaaggcttagatactattcatggataaaaagaacacacaacaactttggcaaaaattaggtttgaccgtacaagtgttgatgaggatttggagcaaaggaaatgctatacactggtggtaaggggtgtagttttgttcaacaactttaaaatacaagttgacgttatattgtaaagctaaacagcacacactctataaaccaggagttctacccctactgtataccctagagaaatcctcatagagaggctgcagaaggcatatacaagagtgttcagagaggcaatgttcaaacagaaaaaaatctggaaacaacctagatatccaccagtaggaaaagacatctactacataaattgtatattcacaaaataaaaacagcattgaatatgaacgaacttctctatacgcagaatgtggatttgttctggaaacactgttgagtgaaaaaagcaatttacagaaaaattatatatggtatgacatcatttttaaacaactcaagagcaaaactaaaaaaaaagttcttttagggatccatacatatgtgatagaactaatttaaaaagcagtggctggacgcagtggctcatacctgtaatcccagctgctcaggagactgaggcctaaggatcactcgagcccaggagttacagtgagctatgatcacaccactgcactccaacctgagggtgacagcgagaccctgcctctaaaaaattgaaataaaatgaaaagcaaaggaatgattaacacaaaattcagaattgtgttttttttctgggggcaggtcagcaaggggatgggactccgggaaaaaaacaggtagcttccatagtcttggtaatgctttaatgcttaaattgagcggggttcaccagtgtttatttaatttatgcttcataacttgcatgtacattacatatatctatttgatacctaatcatgtttgcatgaaaaatgaaaatatttacttccctaatcttctaaatagtcttggagaacaactctcatacttttccaaaaatattatttgataccaataatcaaataaaactttgagcaaggtggacaactggtccgattgaggacattgttatatagggggaaaaaaaattttttttcaaatcccaaagtcataaatgcttattatagaaaatttgaaaaagcagaaaaatataaagaagagaatgttttagattgtgcaaatccatagttgcacaatctagatataaccactgttaacattttgtggtatttctctccagtttttttaaatatataaagttgaaatcaatataacattttaaaatgcattttcctatttagatttgggatcttgttcccgtaaaggtagcaatgatgctatgtatttgggatgtattcagagtaatgtttggttctaagttctattaaatatgttttgtacataaatagtaacttaaattttagaatttttctcattgggaaatttaaggaattagaggagaacagtaatacttaagactgccaaatcttttccattgtgacttttggcatccaagtcatttacttaaaatgtgtgtgatgaactggaaggagttttcctttcaatgatttgctttcttaaactctgatctcatcacaagaatgcattttttctgaaaagtttttaaaagggttttatttcatttctgaacttttgaaagcattggagaatatctgttttcttttgctaatttataattttaaaggcattttccccatttctgaccacatatacaaaagattaatagcattaggtttaaattagtcattctaatatctacttctaaaagcttattcctttaaaatgacttcaacctaccatctacttaaatgttaagatgatatacagcattagagcaggtatacggcataagaatatttagaattgattttaatgattaaattgcaaatctttttaagagctgaaatactttttgtgtctctctcgtgctaggtttctaaaatgcagttctggttcaagaggtgggcttagacatttccacaggtaattctgaagcccatccaggcttgagaagcactgctgttagcttaaggataccaatctccaagtttatacttaaaagaacaattctctctctctctctctctctccttccagctcttgtgctagcctggagaggcagatgaatactcaacttctgtttttcaatttctggggcgccttgacagcttgggcgatgcccccttctaccaccttcagagtaactgaataagtgacgaaggggaagaccccatccccttccaaagacccaccacttctcttgcggaagtggccacacatcattttcctcacttaggaaaatacaaaatgtttcaagagcccattgcttccaggaagttcacagtgagcataaaagaaatataggctaaagaataatccactggcttgtttcccttttggccagctcaccacaggactctgggtttatttggagaatctgccattgataaccttttgttcttggtttgatattagtgctattacaaagaggtcagaatgactgggagagggaggataagatgacaaatttgagcccaaagaaattttttggttactacagaggtaaccaaagatttccagttgatagtgctttttgtgagctagtttataaaagtagatatttttaaaataaatgattacaggattaggggacaaaagtagaaccattgggttgacccaactgtctaccccaagcattggaattaatttagaaaaaagccagcagattgcatgtaacatcttgaaaaagcttatgcaatgtcttcccaaaaccacaaaggaaaaatataaccacaggacaaattactccttgaatgtctgatgagatatgaatagccacaacaataaaacttgtgctaagattaacgtctgagtagctttaaagtatttttagttcttttaatctgaaattgtttagactatcttcagagaaacttctcaactgttttcttactggaaatagttgaaaagctttataaggccaaggttacccaggcagtttgatttatatcttctttaagagagacagagcgagagaagaaacgaagtaacagcaaacatttgtcaagcaaagggctgagagctttgcagagaaataacagatacatttgactatagagatcttccaccttcgtttctagaaatcaggtttgcttggtgtaccttggagaagtaggcgctttcaaatggtcctcccacaagtctcagcagccaaccaaagccaatgattctcagccaactaacccaaggagttctttaaagttaaccaggacctctccacaaaatctcatacaaagtcctgtaacaagaagccacagaaatctcataaaataaaatgcagtaaattaaatgtaagaccagtagcagcccttgagtgttataacaggaattaaataaccaaaaaagaggggaaagtataagcagaacagtcagtttagaaattaatatttctgaaggactgaggattctacaaagaaaaagacaaaattttcatggaagagccggcacaactatgttacacaaaattagctggaaccttcctaaggcaagaagtaaaatcagaggcagctgtctcccagcccttgttttctttcaagcgaagcaagcagtggtgggtggttcccgtgggcaactttggctagaattggtgtcctactaggacagtctatgcccattcaaaatggcaatgagctcctgcctgcattatgactactgccctcctgatttttcctaccagactaatgacagactgccccactgagaagggtctagcggagcacaggtcaccagctgggcaacattcagaaagttagtcttcctatgctcattttcctgggctgttacagaagaagactggaagaggtaatttccaaggttcttcccagctctgaagttgtgtgtcaaaggtacgggcaatgggtgcacacagaagaagaagtgtttctgacctggtatgaccctctcctgcctagcaccgtgacaggaatcagtgctatgatttttaggtgggaaagcacagaatcccctaaaaacatgggatttcatggtggcttggcaagtgacttgagccagactctcacagtagaatgacttcccgttgtgcctgaaagccccttcagagtgacccaaaggagaggtaaagacacttatttaggaagtagaagatgcaggtcacagtggagaaggttataacagcattgggtacattctgccgggacatcagtgaagtgtggctcatcccaggcacaaaccacatcacaacctactcaggattgtgctggatgattttgcaattgtttgttaaaacaacaaaccaacgtgattcccacacttgcccttgtcttttactgtcagcgacagtcaagtcctgacaggtgtgccaaacccacagccaaggatatcttgaagactccaactttctataccttcatgcatcttaaattagcaggaggaggtggatggggttacatctgccaatttttaaaatttttaagtttttggtcccaattcagagacttcgtaggtatggagagaacccagcaggaagtcatgttgcttcaaatttgctagagtaatggttggctctaaagtaaggagatacaagagatcttgaagcttgtgatgggcccattttcctgactttatagtaaattttaatacaatcacagggaagtctgaaattttaaaagacagctgactggatcctcctcagttggattgtggctccatcttgcaagtcctcccctcggggagcacacagtgaggcaggctctttgccgtaaattgtggaatagtggcctggtgactgcaggccggggactcactaaagcatacttagaaagagtgggggcgaagggttgaaggaggaggttgcagagcggcagagtggcacatgcaagcccacaggtggaagtttctcccgtgtctcaatcccctgccttaaatcacttctctgcggacctatctccatctctgtaaaatggaaagacattaaaagcaccgcctccgtctccccaactttgagaagtaacttgtcttgcggggaacttttttggaggaagggtggggtgtgcagccctgcctggagagggccccaaagcgccaacccactgcggagacagaaggccgcctaccggggaggccggaggccggctagtcgcggactcgggcgaacccaccctcgcgatctgtcaagtctgtccccaggggaggtccccctttcgggaggaagtttttaaggggatttctcaaaatcacccccgcgcttccttcactccttccttagagccggaggtcggtgagggcccgcggaatcatctatctcgcccccgtcgcaggcagggatacagttcctgcaaggggtcccggggggcgcgggaggcgcaggacgctaggctctgccgtcagcccgcaacagcgctcagtccagggagggaggcccgggtggggggcagccgtaagcccccgctcagcgtgcagccaccggggacttgcgcggccgtggcaccgctggagggggcggcctggggctggggctgcccggcggcgccgcgaccgccttccttcgctgcgtcccgcccgctccacgcctcgctcaccgccgccgcttctccctgccccgcagcgcgcagggaccatgtcggcggagaccgcgagcggccccacagaggaccaggtggaaatcctggagtacaacttcaacaaggtcgacaagcacccggattccaccacgctgtgcctcatcgcggccgaggcaggcctttccgaggaggagacccaggtgcgtccccacacgcgcccagcgcgccccgacccctgcctgggctgagccttctcgcggctgggcggtcctgttcgtccgcgcctcccgccgggctgccctccccatgatctcccatcgcttctgcccgcatcccaggggcccagaccctgcatggctcccgccgccgcctccccgcttccccgctcccatgggcgcccggtctccccgccacccccatccagccgtggttccccgggagctgcgcagaaacccctcggtcaccagtcctttcttttccactctccccggcagcccgggatacacgctttctccctctgcgagttgggagcagcgtctctcgcctgtccctgtctcgccttcccggctcggtcccctctggtctgtctgcgaaaccttcgggaagatctattctaggcgggaatgtcagagctggaaggcgccccagagaccagctagccataaattcagtcctccggtttggcgaaccaggaggctgaggccgggagggagggcgctgtcaggatggcaggagcggtgaagcatgctctctccaccacatcacactgcagcgtcccccgagctgcagaactcacgctgcacgaagccacggagatttggttccgattttttaaaaaattccccggctctaaggtttagaggtttttcctggcgttttataagacggtagatagctaacatttcagctgacggcagcggcagccgatgtccccctaagtgcattcattgacttatctattttttaaatgctcctgtattatcccgaaaagtgccaggtaaagaatgcaacacggcctgtggttgttaaccacaggtgcaatgtgggagcctttagctgacttttaaaaccctgtctaaactccgacttctcttttccctttggtcatggaaagacaatccttttgcatgatagactacttggaactgatctagcatctctcctgtgggtccccaaagcacttcacacttctaacctcaactctaaagcagagacattatttttcctattttatataccagagcatcaggcacttgtcctgtcaccatgagccatgctcagttgaggtttagaagcttgtaatggatccagtagatccaaggaccaagaccctggaccccaagtccaaaattatttttactaattaagccagaggcactctttggagagcttgtccatagatgatcctgtcatttacaggtcaaacagaaaggcaaacatatctatttttagcaaatggaacagctgtctggccaaccagaaccagaacttaaaggaaggtgatttactgtaacccaagtctaacagctcatgtttcttggcatcccctgagaaggcagcctgctgaaattttatcatttgaaatcccacgctatgcttagaaaagaggagtgatcatggagacaacttatcttttaaaaacaaggctgtgaaatattgtgggcacagcaccaacaagaggtccaaccccttctcggcctctgattgtgcctggcgagttgccatcagtcatcttacctataaagcagcataattacgttgacctttgtaatggctaatacttgccaggcatttttccaggcactgtccaagtagtacatcatttatttgtcacaacaatgctgtgagggtagatactattagcccacttgtccagataaggcaactgaggcacagaaagattaaatatacttgcccaagacagcagccagaaggcagcaggaccaggatttgaaccctggaagcccagactcttaaccaccttgctatgctctctctacagaggaggcatagaaatcactagatgagcaggaggagacaactgacaactctcttggtgctgtctttcctctgcattaggcaacagtcctcccaggctatattcaacctttcctcaagattcacatgatattagagaattgaaataaaatccggttaggggtaggaagaagaaaagggcacctgctttttttctgtgactgaggtcagccaattcagacctctgcatagcaggttcttctgcacctctcaggcagtcctcccatttccccccttctgccattctcaaataaacaagtggtagacccagccccaaaatgagtggatgtggggtgagtcagcctcttagcagggcccctggcttcctcttcctgccacaggaccaacaccttcttcctccctatggctaccacagcttggcttgcccctctgtcttcctgccttgacctgcagggaagcatctggaaccccagagcttagagacaggcagcacttagcaagctcagagaaagagacttcctaggaaccacaggctgtctgcttgcccttactggattgggtgtcatctttcaatttcccattctttcccctctcaccccactacccccatgggtactggtgaatgagaatgatttcttctttcatcttctcaaacaacatttatatttttaaagagtatctcctatgaaaaagaaagtgtctggctgggcacagtagctcacacctgtaatcccagcactttgagaggctgaggcaggaagattgcttgaggctaggagtttcagaccagcctgggcaacatggcaagacgctgcccatctctacaaaaaataaaaaataaaaaagtaaaaaaatcaaacaggtgtgctggtgcatgcctgtagtcccagctactctgaaggctaaggcaagagaatcccttgagcccagaagttcaaggctgcagtgagctatgatcatgccactgcaccacctagcctgggttacagagggagaacctgtctcaaaataagtaagtaaataaaaataaaaatattacaaaaagaaagtgtcttctggagacatatgcccaatgatgaactttccgtcattaaaattatttttgtttatagcaggtcttgaggaccctttaaataactccatggaggctaggacctgctgggcctacatataagtaatgtctggtattgacacttccccagtttctttttctttctttctttctttttttctcttttggagagagtgtctcactctgtcattcaggctggagtacagtggcacgactatggctcacctcatccttggcctcccagcctcaggcaatccttctacctcagcctcccaagtagctgggatataggcatatactaccacatctggctaatttttaagctaatttttaaattgtttgtagagatgggggtctcactatgttgcctgagctggttttgaactcttggtctcaagcaatcctcttgccttggcctcccaaagtgctgggattacaagcatgagccatcgcagccagcctcccctatctctgttcttactagtgttgctcctttccatgggaaagggtcactaaagccaaactaacatttgtttcatgtgcctgagtcctcatcccaccccaacaccacccacctccagaaatggaatcatattcttaacttccctagaacaagtaatacttcagtaccacaaaaagaagcctgagctgcccagtgctcttgcaagatagttaccagaactgattcacagggccgatacttggggcagggacaagcgggactaagaagttgaaacattctctgtcttgggagatttgctggcctctttataattgtcccacttcaggacaaaattctctgtgggggtggaggtggcacccataagaactcaaagtaaagtgaagggtgctgtaattgaaataactttctaagttgcatttactgggatgttagaatgggtttttctcaatacagtaatctaaatatctcctagatttaaattagatgaaaacttacagaatcccagccctatgtcttttattttgaagtcagttttagaagaggctgggaaatctccttcctcagccccgtgggaggttgggatgatctggtgttttctattatttcaaacacacacacacacacacacacacacacacacacacacacactctctctctctctctttctctctctccctttctcttcaattcaagcacaatgtaactggaattggttcttagggaggtctccaagtatttttatctcctcttgatgtcctgagcttgttcccagaacccagtggttttagtcactggatgttttatcggtggaataaagacctctaaaggtctcttcctgaaaagaatgaaatgttagttactagagaaaaggacaggaacaatgttcctttgccccagcccctacccatcacagtgtctaattatcatctgtttattcagagtaaataaatctccatcaatgggcaagggtaatgagggcattcatttataagcaagcaagggatgaatgtctttcccagtggatgactgaaacaaagaagagaaggataaagccaggtggaaaattagcactgatgtgcatgagattgataagatacagctctaaagggaaaaaagcaagcaaggtatttaatgatttctgttggattgcaactggttttgctaaattattatatatatacttgatttaaaatacgcatcttcaaaaaacagttgagcttttcttgacctcctcccatcccccaatgttagggctcagtttgttaagcatttgggtaccaactcacaaaaccacaaatgtggtccctgctgaagttattttcagtaacagtccatcaatattctgcttcattacatagtgtaaagatgtgggtggctcttttaaatgagaccagctcaaccattttttcttaaatgaaatctgatagaaagtgagattttcctcctccagattttaattagtcagtctttacaatgctgccatttcttcagctgtagtaactggaaatcctatttaatcagaccttgcatccttgaaaccccccacagagctacctcattaatgaaactggaaccttgctgctctcataccagaatccagagttaactaaacacacgcacacaggttacagaagaaaatgggcccacccttagcagtagaatttcgattgaagctgccaaagttacatgagttctctcttctcatgaagggtagtgatttgatctccaggagcaaaatatggcacccagaaagtagcccccaaagagaaggctacccccatgatagtctgccgtgcttggctttcgattacttttctctactgccgccccagtgtaaaggtatgtaagatcttgacaactgtgtaaaggatttcagtgtgtaaactctgctgtacaggtgggtgaggtgtaggtgtgttcccatgctattcagcctgcttagcattgatgtggagcccaaagcagtcctgcagagccttacccccattcaagctcaacagcctctcctctaggccttgctccttctccccctgtgattctcacactttcttctgatcttgggcttatatactgaattccctttcagcttcctagagcccatcctgttcattctgagtatctgtataggcatcaagccatgctatgtggggagccctctagaggtttctcaccatcccatctccatcagcacatcccagatctggcatctcacagctgtgctctttctgcttccttcctgttcctcgtccccttacccctagaacaggtgaattatagaaataccagaagggacagtagaaaccccctaagcttacgtttttatttacagatgattggtgctctatttttagggacttcctcaagttctcatagccaattagttactctagagcttcctgttggcagagcccagggctgcagagccctgggtggtcacctaccacacagcctgcctacacaccagtgacacacaaatattgtccttctcaatgtaccccatgacatgtgaatggttgggaagcacaggagaacagagcttgggggaggtgctgacttcccatagagctctgtcctcatcctctccaatgtaggtcaatgcttgctcatctgtttcctcactagtctctcttcaaagttgttttgctttgttttttattcccagtttcctcttgatcaacctggtccagaccctggccctatccccagcatggttctcctgttctcctctttggggagctctgtaccaccccggttagcaagataaaggcagccactgatttctcaagggtataccacactgccttacaacatataggcatgttctaggcctcatatgataccgtgtctagaaacatcccatctggggccttctgtacatccatggtcacttctgtaaggtgtgaatatttgagtcatacggagctgagagattctgagtaaagtggtaggcccactttagcttctctcactgctcagtggccctggagcaggatagattgggctggcctactccatgcatccccaaggagtgctctgaggttgtgcagcgctcagttacctattaatcttattcaacaaattcttactaactgctaccaatgaggaaggcctttggtgagctgagcatacattgatgaaatacagcagccatagagatctatctggggcattaaggagatgctttaacttcttttatttattcagcaaatattgattaatttctaactcttaaacctttgtactagtggctaaggatgcaatggtgataggatgaatacagtctctgctttcatggatcttacattctagaagggaatatagatttaaaacaagtgaatacacaagtaaatcatgacagatgctaaaagttctgtgaaagtaacaaaatactaaattgggaagtaaggagatgagtgggaaacccattttagatagagtgatcagggaaggcttcattgagaaggtcctgtttaagctgagatgtgaggatgacagggagatcatcagataaagaataaagagagaatattctaaacataggaaatagcatgtgcaaaggtcctgaggcaggaaagtttagtgtcacagtgagaaccatccctatgggaacattccttgattctctcctttccacttgtgccacagaggctaccttttagaaagggaacaggcatttcagtttttctgtatgtgacaaatattttttctcatttctctcttccagaaatggtttaagcagcgcctggcaaagtggcggcgctcagaaggcctgccctcagagtgcagatccgtcacagactaaggagatggcaggcattgacagcttcactccatgaaggccatctctgtttctctcctccgcttaaccaagctgttgtggtttttcagcatagtgttgtatgttccattgctagctgtcctgctgtttaacacagtgttgtattttttttctaaatgtacataattagaaaagaaaataacaataggaagctatgtgtatcttctgtgtaaagcagtggcttcactggaaaaatggtgtggctagcatttccctttgagtcatgatgacagatggtgtgaaaaccatctaagtttgcttttgaccatcacctcccagtagcaatttgctttcataatccatttagcaatccaggcctctgttgaaaagataatatgagggagaagggaacacatttccttctgaacttacttccctaagtcactttccttatgtatcatctaatacaatgatggttgagtgaaaatacagaaggggtgtttgagtattcagatttcataaaacacttccttggaatatagctgcattaacttggaaagaagcctgttgggccagaagacagaaactccaactggcaaaaaagcaagcatctaagaaaaaaaaccaccaaagttcttgaatttactatatttaaatgcattggttaagtttattttgctaaataaagtgaactgctttttgtctctaaaatgatattctaaataaaaccttaactttttgttgaagatgcactg

SEQ ID NO: 19 - DNA, 10202 bp, Homo sapiens
cggctatccgcgcgggagtgcgccacgcggggccggagcgcctattagccgccaggacctcggagcgccccgaccacccctgagcccctctggcttcggagccccccagcaccccttcccgggtcccctcgcccaccctaatccactctccctccctttcccggattccctcgctcaccccatcctctctcccgccccttcctggattccctcacccgtctcgatcccctctccgccctttcccagagacccagagcccctgaccccccgcgccctccccggagccccccgcgcgtgccgcggccatggcggccgtgcgcggggcgcccctgctcagctgcctcctggcgttgctggccctgtgccctggagggcgcccgcagacggtgctgaccgacgacgagatcgaggagttcctcgagggcttcctgtcagagctagaacctgagccccgggaggacgacgtggaggccccgccgcctcccgagcccaccccgcgggtccgaaaagcccaggcggggggcaagccagggaagcggccagggacggccgcagaaggtaagagcccagggcagggcgggggtgtggggggctggcatctcaggtgggaacagggggattcggtagggtctggccactccccagtctgctaggggaggaatggctggcttactaatgcgcacgcgagcccagatgcctggagggaccctgtgctaggccgaggtcagcgctggcgtggaggcacatccagcacccgggcggcagggccgcttttgggggccggtggctctagggttggtgctgtggttgtacgggtcgcttatccccattcctccagtacgcgacaggtactaggcttgagccacaggggactgtgctgtgtcaccccctgccatactaatgggaccactctccctgttggtggcacagcttcacgtcgtccctccctcctgcctttgccctcctactccaggaggtctcacgtaggtgagagagtttcaggtggtggtgagcacagggcttcaggtggtggtgagcaatgggtggtcctacattagtacaggaaattagatgaggtgatgcatcactgaagcatttaacccacggcctcttgcataatcagttgtcagtaaatcttagctgttttcatcgtggccctctggaaggtggcagagggtcttgtgatccctgtctcccaggagattccaaggcaccatccaacattcctgatgtcagcagcccctcccctgccaccccagctctagatctttcctggctgcttcccacaccctgggctgcctgtgcccctcctgcctctggctctccttccaggcttgctctcctggctctggggcaccgctctagcagccctgcgtcccctggctgtctgcatttggtagctttcctgtgtttctgccaaacttccctcatgctccccacctctcatcaggttctcaacagcacttgcagctcctgcttagggtcctgggaggattcccatggggaatcctcacaaccagtccctgctccctctcccagactctgaaatgagtgtgcagccacaagctccctacctgtcttttctgtcctctgtgtgatccctgaaccccccaggactccctatccttccaatcaattccaaaccccttacttctcgaaaggagaccacttcctcttctttgggcttcaatactcaaccaagtgtcccttttctttgaagcttttcttgccccgtaggagaccaggggaaggtcttgggcccatgtcccttcctttgtatggcagttggcagggatgaccagatgctcctccaggcctggatggctcagtcacctctctgccccttctgtgcccagaacagaatagtggaggagtggatagtaaggaacccctattgaggttttggcaggtggggggatgagggcctccccctgggaactgggaaccctacgctcagtctttagagaggttgagattggtggtcacagccccagacttgcagacagaaaatctgggtccggatcccagtttgccacttgggcaaatgacttaacctctcagtttgctgatccgcactgggaactgacaagagtccctgtgcccaggttctgggcatctagagaggggcctcatgggggcacagagctggctctgttcatttgacacgagtctgcatcttggacagtgcctccggaaaagaccaaagacaaagggaagaaaggcaagaaagacaaaggccccaaggtgcccaaggagtccttggaggggtcccccaggccgcccaagaaggggaaggagaagccacccaaggccaccaagaagcccaaggagaagccacctaaggccaccaagaagcccaaggagaagccacccaaggccaccaagaagcccaaagagaagccacccaaggccaccaagaagcccccgtcagggaagaggccccccattctggctccctcagaaaccctggagtggccactgcccccaccccccagccctggccccgaggagctaccccaggagggaggtttgtgccgggctcctctggggtgatggggctctgactgcctgctcgggtggaggcagggagtgggaggcaggtttctggggccctgcttcctatagaccttcagctccccactggatgggaacctcacttttgctataaatttcacaatttgattggtgggctccctcagtgctgtagcctcttttgggtagggagagggcttggcagccttttgggtgggacctctgtccctcaggcccctgcccagatgtccctgggctctgagcccatggagttccctcctgccttctcccgctggggacagctttgtggtagggcctccagcagcacagtaggttccccagaaggtgggcccagctctctggccccatgagatgccagcaggatgctgaaggccagaggagctcaggcctccttggagtgagctcggcctcaggagggtgtccacaggctctgtgtgggctctatgggtggctggtggcctgaggctcccaaggtggtcagagcaggcctcccgcccacctgcttctggaactcctgtgttgcaggggcgcccctctcaaataactggcagaatccaggagaggagacccatgtggaggcacgggagcaccagcctggtgagtggccgtcatccgcctggccttggggccagctgccctggctggttggactgagggcttccccagagtaggcctgggtggggttgtcaggcagctaccagcgctttcccctcagagccggaggaggagaccgagcaacccacactggactacaatgaccagatcgagagggaggactatgaggactgtgagtagggtcctgccagccccacctgggtcggacccctggcctgggggatgtgccaatgggcccatcccagccttgggccccactctgagccagcctccccctcagttgagtacattcggcgccagaagcaacccaggccacccccaagcagaaggaggaggcccgagcgggtctggccagagccccctgaggagaaggccccggccccagccccggaggagaggattggtaggatggggggcaggagaggaggtgccatggccacggcgctctggccccctcctaacctccccgcctccccagagcctcctgtgaagcctctgctgcccccgctgccccctgactatggtgatggttacgtgatccccaactacgatgacagtgagtacccagcaccccagagtctgagggacataggcaggtgggggtcggggctggggtgtggtcaggagccagctggggcaactcacccaccttgcaaccccacctgtgcccgtggttacctcgctgtccctgctgtccctgcgtgcccaccccagccactgccctgtctcctctgccctcaggctggtctttccttggccgcttccctggttcctgcttggctgtgacccccacaggggtgtccctaggcacacactctgccctgtcacccatgtgggttccagccctcccagtcctgtgctctaactggcttcccgctggctcgtggccactgccccactctcttcagggagcccgagggcttttgcctccctgttgctcatgcccctgcgtccctggagccctcaggttccctttcctcctgggtggcagcccgtgcatcgccatttccctgcccccaggtccccatcagtgcctccaatgtctccccatctcaccccccagcccgcaaccccaggcacaggtgccagttgtccctccaggcctttcccatgccctgggcctcgagtcctttccccaggccagatgctcctggaaggccgggctggtgacttcagcagggtcttgctcagctgcccctgagctcgggctgctcctgactcctgcaagaccctctcccaactcagctgtcccccatctcccgtcctcctcccctctggcgcggtcctgtcctgctgagctcctgtggacccaggagctgaggccccgcagcagggtcagggcagcctcagctggctctccctccccatagtggactattactttgggcctcctccgccccagaagcccgatgctgagcgccagacagacgaagagaaggaggagctgagtgagtgggaccaaggacttcccacaccaggcctgccctgaaggccacctggggcctgcctgatccaccccacatggtcctcaaagcccagagccaggctgactggcccctcctaccttgcaccttccagagaaacccaaaaaggaggacagcagccccaaggaggagaccgacaagtgggcagtggagaagggcaaggaccacaaaggtgtgtggctggggcttggggcctgggtccctgtggggcagcatctggactcctgattgcctcccgggcccttggtgccatgtcctcccttcattgtccctagagccccgaaagggcgaggagttggaggaggagtggacgcctacggagaaagtcagtaagtggggggcacaagggggtgagggtgggggccacaggatgggggtgctgggacaagtgactggcccaatgtcacaaacaggacccaggtccccggaaccctttcctactcagattcttgggacccagaagggaggggccccgggagcccaggatagcctcgcttggctgccccagccctggaccccaggctggcctgcttcaggagggtggcagctccccagggcccctagtggctgggcgtggtagggggaggacctggggccttggtggggagtgaggacctcaggtaccttcacaggtatccctgcagggccattgtgcagacggtccccatctggatgacatctgtggctgcgccctgggggagctctacctgtgatttcacgtgtgtcccctgagagctgggcatggtcagcccgttctccagatggggcagctgaggcccagggaggggaagcacaggctgggattggaaacagctcctggcctggctttgagtcgattccaggtgggctggtgcagggcaccagggagccaccagctgaccagagctgccctctgactgtgcccccgatgtgccgggagtgggctctgggctccttggttctgggtttggtggagggaaggatggagctagtgagccaccattctggggtacgcgtcctcagagtgtccccccattgggatggagtcacaccgtattgaggacaaccagatccgagcctcctccatgctgcgccacggcctgggggcacagcgcggccggctcaacatgcaggtgggcattgggatgggcccatctcccaactgggataagggactcctccgcccatgctcagcctcccctgccccctggacagaccggtgccactgaggacgactactatgatggtgcgtggtgtgccgaggacgatgccaggacccagtggatagaggtggacaccaggaggactacccggttcacaggcgtcatcacccagggcagagactccagcatccagtgcgtggccaggctcatggatagttggcagaggggagtggctacataggcatggctctgtgtcccattaaggagattccagtgggcccttctttggcccagccaaagaaggccaaaaagatcagtgagggactcaccctgcccatccccactcctcagcctggtcagtcagcccctgtgtcctgatagcacatgagtttagggacagatcacctgcccatggctatgtgacgggcataggacccaggctcaacacctgggccgtgcagcaccaccctgctagctcttaaattcttggggctcggaagagggaggctcaggccacctgagggcctgggagggggaagacccttgctctgaccactgtccactccacagtgacgattttgtgaccaccttcttcgtgggcttcagcaatgacagccagacatgggtgatgtacaccaacggctatgaggaaatggtgggcaccatgcccaggctcttggctctgctcccattgtctgggcgaggggtgggctctcagaggggctggcagtactgctctgaggcctgcctctccccagacctttcatgggaacgtggacaaggacacacccgtgctgagtgagctcccagagccggtggtggctcgtttcatccgcatctacccactcacctggaatggcagcctgtgcatgcgcctggaggtgctggggtgctctgtggcccgtgagtgtggagggctggcaggggctctgagtggaggtggggtgctagggtgggccagccggcacccagctaaagacaaccccgcctcccttgcagctgtctacagctactacgcacagaatgaggtggtggccaccgatgacctggatttccggcaccacagctacaaggacatgcgccaggttgggagcatatatcctggggctgggggtgggacctgtctgtggctgacgggagtgtgtgcctggtgcttctgtcactgggcccagtccctactggttccagggatgctggctgtccctcaccttaggaaggaggccagtacctgggggctgcgtgaaggggtcatgcccgtccctcgccatagagcaggccctggaagtggaaggggcatggtcagcgggggacggattgcatgattgattccacgtcctccccctctgccccagctcatgaaggtggtgaacgaggagtgccccaccatcacccgcacttacagcctgggcaagagctcacgaggcctcaagatctatgccatggagatctcagacaaccctggggagcatgaactgggtgagggtctgtgggggccagcagctggcctctgctgctgatgtgcagagctcactgcctcccgcctgttccggagcctctctggggattctggcttgtcttacagggccctaggagccccagctgtcccccagaccctcgggtatgaggtgggtctgggtccttcctcagctgccctgggcctcgggagactgagtgctcactgaggctcccgcccttgcaggggagcccgagttccgctacactgctgggatccatggcaacgaggtgctgggccgagagctgttgctgctgctcatgcagtacctgtgccgagagtaccgcgatgggaacccacgtgtgcgcagcctggtgcaggacacacgcatccacctggtgccctcactgaaccctgatggctacgaggtggcagcgcagatggtgggttgaagggtgaggctggccagggtccaggcagctgggggttgtgggggtgtgggtagccgatgcctaccctgctggctccccacagggctcagagtttgggaactgggcgctgggactgtggactgaggagggctttgacatctttgaagatttcccggatctcaactctgtgctctggggagctgaggagaggaaatgggtcccctaccgggtccccaacaataacttgcccatccctgaacgctacctttcgccagatgccacggtgaggctacagcctggctgaaagggcaggagggagcagctggaccctggggtcctggtgttctgggcttgggggtggggctgacggtgcctgaactccagacgctgaggctctgggggttgggggacaggggatcgtgcgagtactggtgtgaagcttcatggagggtgatcgggctaggttggggatagtggccggagctgcagccctggcctcacacgtgctggccactccaggtatccacggaggtccgggccatcattgcctggatggagaagaaccccttcgtgctgggagcaaatctgaacggcggcgagcggctagtatcctacccctacgatatggcccgcacgcctacccaggagcagctgctggccgcagccatggcagcagcccggggggaggatgaggacgaggtctccgaggcccaggagactccagaccacgccatcttccggtggcttgccatctccttcgcctccgcacacctcaccttgaccgagccctaccgcggaggctgccaagcccaggactacaccggcggcatgggcatcgtcaacggggccaagtggaacccccggaccgggagtgagtcagcctgggaggggctgtgggcggggcctggtccggagaggggctgactttgggtctgtatctgtccccggccagctatcaatgacttcagttacctgcataccaactgcctggagctctccttctacctgggctgtgacaagttccctcatgagagtgagctgccccgcgagtgggagaacaacaaggaggcgctgctcaccttcatggagcaggtggggtggctagggcaatgcctggggagaggaggctgcacaggctcctggatgggcgggagggagcagcggaccacattggaccttcctgaggaccagcagccctcacctgcttccctaggtgcaccgcggcattaagggggtggtgacggacgagcaaggcatccccattgccaacgccaccatctctgtgagtggcattaatcacggcgtgaagacaggtacctagtgtgcacacctttaccccatctttctgagggaggacccgccagagagggtgggggcttgaggaactcagcgagcaggtagagtctggggagcctgggggcgaaattcagagagggagggcggtgctgggggcgggaactcagagggggagggcggggctgggggcaggactgagtgggagggtgggggcctgggaggggcgctctggggcagccggatcgttctccctccgcagccagtggtggtgattactggcgaatcttgaacccgggtgagtaccgcgtgacagcccacgcggagggctacaccccgagcgccaagacctgcaatgttgactatgacatcggggccactcagtgcaacttcatcctggctcgctccaactggaagcgcatccgggagatcatggccatgaacgggaaccggcctatcccacacatagacccatcgcgccctatgaccccccaacagcgacgcctgcagcagcgacgcctacaacaccgcctgcggcttcgggcacagatgcggctgcggcgcctcaacgccaccaccaccctaggcccccacactgtgcctcccacgctgccccctgcccctgccaccaccctgagcactaccatagagccctggggcctcataccgccaaccaccgctggctgggaggagtcggagactgagacctacacagaggtggtgacagagtttgggaccgaggtggagcccgagtttgggaccaaggtggagcccgagtttgagacccagttggagcctgagtttgagacccagctggaacccgagtttgaggaagaggaggaggaggagaaagaggaggagatagccactggccaggcattccccttcacaacagtagagacctacacagtgaactttggggacttctgagatcagcgtcctaccaagaccccagcccaactcaagctacagcagcagcacttcccaagcctgctgaccacagtcacatcacccatcagcacatggaaggcccctggtatggacactgaaaggaagggctggtcctgcccctttgagggggtgcaaacatgactgggacctaagagccagaggctgtgtagaggctcctgctccacctgccagtctcgtaagagatggggttgctgcagtgttggagtaggggcagagggagggagccaaggtcactccaataaaacaagctcatggcacg

SEQ ID NO: 20 - DNA, 241628 bp, Homo sapiens
tatgagaaattaaaactggagaaagagggctttcctccttgaaggaagggtgttgggtgaactaacactattttctcctgccctttcccccaatctcaatccctttctctccaaacattcttccttgagcaccccactctggcactcaaaaagccatgggaatgggaaagaagtggctggaagtaaacagcctgcttactcacagcaactgaaaattttgtttcgacgattctggttccaggggcaggagctgaagattaatgcctggagtctgccccattctgagagcagcagcctggctcctggtggctccagcagcaggtaggaaaaaaatgtttgttcttacccttttttatgaaatataatctgaagacaaatttaatgttaaattcctgtacaatgggcacagtagaatcatcgaagggtttaaataatttgatttgtctgcaaaccagcccaaactgctgagggagttggttctgctgctgaagttgatctgtctcatgatttattctttagggaagggggtaccttgggttgtccaatgtaacagccactgctgtcagggctaggaagaaactcacatcttcatgacttgacagtgcctgtgctttctgtacttttgcttacagtgtgtgtgtttatgtacgtgtcctgtactctagacacacacttgccttggtaagaacactctcaaaaacacagatgataacctgaccagaagaccggtccctttgatgcaccgttttattctaaatgtttcaagagcccaacaatgacttcttgtaagacaccatcataagtttttaaaaaggaagttattaagagtctgggaaacattaagtaggtgtcggttacattagtatcagttacatgcttaccctctgggttggaaaaggagacatttacatatttggggttcctgcacttcttttatgaggggtataacttagcaaaactagacaagaaactgtacaatgaatacaatgagctgttacagagtttgtcataaccagatcccaagtgttgtaaaagtaaaatatgatgcatgtgtgatagaaggaagtgataaagggaatatggagaagaacaaagtggagttttatgagaatttctaggtctacttttaaaaaacagactaagtttgtgagtcagtaactaggcaatcagttctcagagaagctacttatgaactgtgtcatcacattacttttaagatgaccaaatattgaggctatctgttgtttgccattgtgagtgtgtgcttgtgtttctgcatgtgtatttatgacagagagagagagacagaatatgagggagggagagaggagaaactctcatatattggcttacagacaaatgctgggtcatttaaaaatgcatctctgtaaccacttgttctggaaacattaatcaccaccttctgtgttttgggcaccgtgctgggtcctggctgtatacgtgtgtatagtgtgtggggcacagtgctaggtcctggacgatatatgtgtgtattttgtgtgtgtgtgtgtgtgtataaaatgcgaaatttcttctttagtaacctttacctacctcttattcgtgttgccaacaaaaagacaaccgcagagttttagtgcagttaccgtagcagaattcttaaggtggcccagttaccgaaactgcttgtgtactgacctactataaaaatatgtattgtctatatatacttgggaatgacaccctgttgaaaataaatactgtgttcctctcagtactgggctcaagcttccttaaaatccagttctccaaggccaagaatagtgagagcactgctatgagatttggaccctgtttgtgatccctgagttccctgggcaagggccctggttcttgactaagggcaggctctaaggcagggaccaaataccttctctgccctgccctctccccaaaaccctgggaatgaagttgaatggggagtggggtgggtggagccccttcccctttggaagactcttccctgggtgtctccaagggaagcttcttttctcttttgcatcgttctgaatgccctaggccctcaacaaacattcttgaacttccttgcatgttagcatggggccctcacctgccctaagaggctaactccttagctggactgaggcaggcccacaggcaaggttgatagatgtaaaggtcacctcagtaccagcacatgcgcttccttttcactgcttccttacagctgcttcttctcttggttgctataaataacatccttccccactctggaaaatgtctgagtttttcattgatggttccccagctcctcacatctcctagttctggtgaaatatgctgccatgggggaaatgacaaagcagaggaagaaatcagcagcaatatcagtaacagcacccagaatttgctgagcgccagctatgtgccaggtactgtgccaaaggctttatatacctgatctaatttattctttacaacaaccctatgaagtaaggactactggtatccccatttcatagaaacaaacaaacaaaacaaaacaaaaaaatttaaaaaatgaaaccaaaatggacgcttagccttttctctgctgctgggggattcaaatctaagtgcccgactccaaagcattcgaccacagcctgtgatgacagtgaaaatcaaattgatcttgaaagttggccaggagaagacagtacagctctgtgaggcggacacttaggcagaatcccttctggccctcttagctcccctgttcttccatggaggctctggaaaggtctgctggaaaccaccagggagaccaaaggacttcctctgctgcctgtgagttgtctctccaagtgtcctgtcgtgcctccctttgaggtctggcagctgacatttatcttggtctttgtttacaaacaagggctgtgcatcttgttctttccttgctgttcagggctgactctaactctgcaggaacatatgtttgacttccactatgctgctgtttccggagacagagtcctgctttaagaggagtcaggaagtgtccacacttgttcttttcctttccttgagtttcagctaatatattccccagaacctacctagaaccaagagttctcctcttgggatggactcctagtacctgtttgaaactactctcaggtagagtttgggaaatctctaacctgtttgcctgtggtcctacaattaaccagtcttgtgatagctcattcccaagctgtcacaactgtcacaactctaacctgttcctgtgtgtatctataggcaaatcttctgtaatgtggatcttgtctcacaagactagggatgccagaggagggccaaggtcagcctccttagcaccgagaccattggatgactctggttaacttgagcagcataccgagacctatccccttaaacgtcttagaaactatttttattgtataacttggtaatgaatcagtcaagtatcaccttctttgatgtttggtcttaagttgcttattttcattttcaaagagtttctctcattttgaatttttaaaaaaagagaataaaagaattgcagatttgaaacaacagaaaggaagaagactaatattaattgaacaggtagtgtgtacccagtgttttactatcctctttacatgtgatacaccatttaatcatgacagaacctggcaaagtagaaagacccattttacagttgaagacattaaggtttagtaaaagttcagtactaggtgtgatggaggcggcatgtaaatgggggttgtaatttgaagctcaagttgtttcccttattccatgctgcgtccaccatggcgcctggattacaaactccttcccagtggacagggtgtgctcagatggttcatctcatttaatcttcacaatcctgggatataggtacatgacactgattcagcagatggggaaactgagactcagaagatgctgctgggtttatttaaaaccacttcctattatggctttaaaaagtttcctcctcatctcaaagacagctgacttcctgggaaaatggtgtttacatgaaaaaatttaatctcccagatcctaatcaacaatcatctatttgtatcactttagatttttcaaaaccttgatcttagcaatatgtgtttactactttgttctacttcatttctaacacaattttatttcatagacacaggctgatatggtttggctgtgtccccacccaaatcttgaattgtagctcccataattcccataatacatgtcgtaggagggactcagtgggaggtaattgaatcatgagggtgggtatttcctgtgccgttcttgtgatagtgaataagtctcacgagatctgatggttttataaaggggagttcccctgcacatgctctctctcttccctgctgccatgtcagatgtgattttgctcttcctttgccttccaccatgattgtgaggcatccccagccctgtggaactgtgagtcaattaaacctgtttcctttataaattacccagtctcagctgtgtctttattagcagtgtgagaactaatacacgaggaaatgtcaatgaaatgacatacttgtcatttactatatgaatatagttttctatcatattactcaggccaattccttattattgagcatttgagatggtccaatgaatgcaactttttaactttttcctttgggtttttctttcagacgtgtcagtctgttcaggctgctataataaaatatcataaatttgcatggcttatgaacaatagaaatttatttctcacagttctaaaggctggaaagtccaagaacaaggtgccagctgatatggtgtctggtgagggtctgcttcctgatagataaccattgtcttactctaactggtggaaggtgctagctagtgggggttctttttaaataagggcactaatcccaattatgtggattcataaggatttcaacctatgaattcttggggtacacaaacatgcagacaatatcattctgtcccagtcccccaaaattcatgttcttctttcatgcaaaatacattcattgcatcccaatagcgccaagagtcttaacttatttcagcatcaactcaaaagtctagagtccaaggtctcatctaaatagcctctaaattagatatggatgagatttaagatatgattcattctgaggcaaattgctctctagctatgaatctatgaaaccaaacatgttatatgcttctatgatacagtggtaggataggcttagaatggacattcccaatccaaaaaggaaaaatagggaagaagaaaggagtaactggttctgagcaagtccaaaaccttaaaactcaaaaacaatctttggcttgatgctgtgccctccaggcacactggggcagagactctgccttctggatccactggagtggcagttctaccctcacagatttgtcgggcaaagcccatgccacagctgtcatggttcggagttgtgtgcttgtggttctttggggctgaaatgcacacctgtggcaacatctatctagggtcatgggggcagcctcacccccatggctgcactccgcattgattttggtgccctaatggtagtctatgataaccctgtgcttgatggggcttttgcactctgggcccatgatgaaggtgacagccgtaatattttctgaatttccttcagagccattcttccattgtcttggacaataggtcctggtttctgtttagatagttgactaatttccttgtcaactatcgttgtcatttggccacactcttgatgttttctcccaaatatacgttctcattctttacaatatggataagctgagaattttctaaatctttcagctctgcttccatctggattaacaatttcatctttacgtcatttctctcttctcacattttagtatagtcagccaggagaagccaaaccataccttcaacacttgacttagaattttcctcagccaaatatccaatttcactgctcacaagtttttccttccacaaaacactaagacaaagacacaattcaactaaggtatttgccactttgtgacaaggatcacctttcttccattgtttaataacatgtttcttgtttccctctgagatctcatcagaatggccttcatatccatatttcaccaatattctgttcacaacaaccacttatatattctctaagaatattaaggcattctctacagctcttctcttttctttccgagtcctcaccagaatcacttttaagggtctatcttaggaggacacaaaagttcagaccatagcaggggagtatggcctccaaagaagaaatcactgagtcaaatagaatgacaaattttatagctcttctggcaaattgccagattgatttcctcagaaaccagcaacaaatacaagcattgtctcccgacagtcctaggctgccctgttctttattaagttgaattcatttatagttctcctctccaaaagctttgggggcattgatattagagtgtctttctccctatcactgagccttctaactgaggactgacactgagccagctaacagcagcaattcctccagtgagggtaagaagacgttaaatgccatgttccgtggcctaaaggaattggagaggtagaggaaatgcatgggacaaattgagaaggaaagaaaactaggtgaagaagccatgataaacagaggtgtaatggatgatatgggaaaattaatcccttggggttcttgaaataaagaccaagatgtgaactatatttatttattggtttaggtggtcaccagtctccaagatagcccctaatgatgatattagtaccctgtgttgtccctacccacattctataagcattggtctgtgtggctggaatacaagagaagtgatgatatgttacttctgtattagaatgtggaagatgtagcagcttccatcttggccactcattcctctctcacactcttggatcactcactctgaggaatccagctgcaagttgaaagcagcactgtggagaggcccacgtcatgaagagcatggtggtgacagtgttccaactgcagcagaatcccaaaccacaccttcacaagaaaacctgcaccatctgctcaactagctccttgttaaactgaatagactgtatcagttatctattgctgtggaacgaagcaccccaaaatatagtggctgaaaacaacaatgatttcttgtttctcacacttctttggattagttaagtagctctcatgctgtcttcttcctagacttactcgtgtgactacagttagctacagatttaaaagggcgtcactcccatgtctggggcctcagatagagatggttggaatagctgggactctaacttctgtgattttcttataggctttaggacagtgcaatgttctcagggtaccaagaggataacagtaaaagctgcgaagcctcttcagatctgggcttggaagttgcacagcattacttctgccacattctattgggtaaaacaagtaaaaaaggttagcttagattaagagatgtgggaataaactctacctcttaatgagaagatttgcaaataatttttggtcacttataatccacaggtctaccatctggaaataattatttgcattcttcccatatgcaaaatacactcatccctccaagacacttaaagtctcatctttatgtgtgtcttaatgattgtgtctggtttgaagtccatgattttttgatctgccatccggtccagacataaaatttctcacatgtaatttctcttcatccagaaatgagatttgccttccaacatagcatatcctgccccctgttcatttcctctaaattatacttacaagttaaaccatacacccaccatacaatgttgaaacagggacatggtaaccttaatatcctcattcaaaaaggagggtaatggaggcaatagcagtaattggtccatagtaattctgacatatgtatctgggcacatattttcagattcctccactcaagcaggcagaattccttgattagaatctggctctactcctgactcaacgctctgggttcttgattccatcttctgaaataacttttttttttttttttttaagaaacaacctatgttttcagccaagtatctctctcagcctgttgcttgcttgtagaaagttgggagcccagaggtctcttatcatctaaactgttatttatataaaactgttcttcaatctgatacaactcctttaaaaactttatcggttttccatgtatcatattattattccctctattagacaaaatctatacccataattctttctgggacaggcctctctctactaatgctctctccacactaatgttacaatagaaatataatgcaagccacatgtgtgagtcatatatatgtttttttgaaatcctaatagccacatattttaaaagagtaagaagaaacagatgaaattgtaatatattattagatgcagtgtatctaaaacattatcatttcaacatgtaatctgtataaaaattattgagatattttaaacttttccatactacatgtttgaaacccagcatgtattttacacttacaaaacatctcaatttggactagccatatttcaagtgcccagtagctacacatcactagtggttaccatcctgggcagcccagctctatattacccagagatattttgggatgaggcttctacgaatcttagaagccctttcatccagttgagagtctactcagaacttcctaaagtcctttagaggccttaatacaggatttcatagccacactctagattaatctttaccctgaaaccattttttactttgagaatcctttgccagctggagaaaatggaaatgaggaacagtcttacattctaatccagcaagtcctgggacctgctcatttcctctatgttgtgcttgcaaactaaatgattccttctttaattcatccgtctttcttctataccttatcaggcagtgttaaaaataaaaacaaaaaactattttagcattttgtgtagaaatagcattagccagacccataagcgtatcaggtacagtttttgctttacaagttaccacaggaaattattttgctgattgtttcaaaaatatgggtttccctttttccagactccagaaataatttcctctctgctctttcagcctctgcccaccatgtggtcccaaagccaatgccacatattttaatttttgttttgtggcagcactccactcaccaatttttgttttcattgcagagtaacaagtgattccgacgcttagtgacttaaaacaataatttgttatttctcatgattccatgggttgcctgtctagcttaattgctactggtattacctgggcttatgcacgtggctgccttcagctggaagatcaacaggggcctgggcttagctgggacagctgggcctctctctgtccatctgctctttcatccttcaggaggctagactttctcatgtggtggtggcagtgttctgagagtacagtacaagcttcaacaggcaagcatttatcgagcttctaaccatgatcacatctactcattccatccacgtgacgaaacccggcatcgcatgggaggaaactacacaagggcatggatcctgggaggcatgatgagttggggaataattaatgtaaaatctaccactagatctcataggtattttatgtattacataagatatttgtatctaaagcactttttagcacagtcctactgcactgcaatttgcccaaggtcccacaaagagtgactgaatttggttccaatgttgcttttacttcacatttggaaagattccacccatgcttgctcaatctaacaagaaacagagttgagcagatgggacaggtttcctggcagaggtgtgacttggaattccactgcagttttcaatacagttacttctcacacagagagacctcacaggatcccttgcaatagataacgttcaataaacacatgtttcttgatgctccttttgttccagagaggaaccttgccctcctttagcggagatgttgactctcagcaacgacagctgagcctgtagtttttctctgttcacagttgtcacctggcctttcattaatatacaagagaaagcagagaaagagtaattgaggtatgaatggcccaattttcttttctatatttcatgctaaaacttctgtggttttgatagatttccaatttaaaggaaattggctaacacttattcagaacttttgtgttaagtgtgagacattgtataaaagcttcaactacattaacttatttaatccttaaagcagtctgttttacagatgaggaaataaagcacagagaaactaggtaacagcccaaggtcacacagcaaataagacgtggagtaggggcctgaccccaggcagcccagctccgaggtccatgtttctaatcactgtcccacagctgtctacatacagggaaagcaaagagaccatgaaatcagagaaaagcaaagtgtggagtatagcagaaatcagagcaacagtctgatgctgcatatattcttttcaggtattcggtccttgggtgatctgtataaactcttttaggactctaatttcttttggtcacttggtttcccaattcggcacatgggttgggaggtatttttttttcttaatttgtctcatttgattcttatgtctgaactgagcttgttaaattgaaaatattctcatgagttatggaaataatggcttggtggccctgaaccctggctagagagggtgccatgtcttggaagacctcagcagggctcctgctaacgtggtggagaacacatagtttagctcctgctacatcaagacttacgattttgcgaaggtgccaagtttgcatgcagggtgacaaaaagaagcagctcacattcacaattaagtcttttaaaatctgcccaaatgttgccggagctgcattttaaagcgttttggcagttacatattttgggagatgatgggggaaatgttagagatgtaaacgaatgtggaagtagtgtaaagatagtgtgtatgtaggccgggcgtggtggcttacacctgtaattccagcactttgagggtccaaggtgggcggatcatgaggtcaggagtttgagaccagcttgacctacatggtgaaaccctgtctctactaaaaatacacaaattagccaggcgtggtggcacgcgtctgtaatcccagctactcaggaggctgaggcaggacaatcgcttgaaccctggaagcggaggtggcagtgagccaagatcgtgctccagcctgggcgacactgcactccagcctgggcgacagagtgagactctgtctcaaaaaaaaaaagatagaaaaagatagtgtgtatgtaaagagaaagttttgaatgaagcaagatctgtgctactcactcatttttagattagtttttgtatgtgtggacacagaaagacctgaatcattaatgtgtcttcagttaacagaaaaagatttaggaagttaaggaaccctgaaggccatagaagattatatatatgtacatatatacatatgtgtgtgtgtgtgtgtatatacacacatacatataatgggtgtgagtcacatgtagcttaagtatcttgagttggaagcccatacggtgagcagtacagtgagttgtttctaaattaatttctatggcaattgtcaatgatctcaaaaatgttggcctaaattaggaagcagatttgatctttgatactgcagggattttgccatgaatagttatgggaaacttgccagcttatcagggtggattggcattaagaaagctggtgctcagacagcttccctgttcctccttcctagcataaatcatttcctctactccaaaactctaacaattgggcttagaattatactatgcactgaataagaaattggaaacagaagttcagaatctctccatgccctgtttcctcctgacttgctgcttcatttggggtgttatgtcattttctttgttcttcaacttttattttaagttcagaagtacttgtgcaggatgtgcaggtttgttgcataggtaaatgtgtgccatggtggtttgctgcacagatcatcccgtcacctaggtattaagcccagcatccataaactatgcttcctgatgctctccctcccccaaccaacccctcccaacaggccccagtgtgttgtttccccaccatgtgcccatgcattctcattattcagctcccacttgtaagtgagaacatgcggtgtttggttatctatttctgtgttagtttgctgaggataatggctttcagctccatccaggtccttgcaaaggacatgattctgttcctttttatggctccatagtattccatggtgtatatgtaccacattttctttatccagtctataactgatgggcatttaggttgattccatgcctttgctactgtgaatagtaccacaatgaaccaacgcatgcatgtttctttataataaaacaatatatatatatatccttttggatatatacccagtaatgggattgctgggtcaaatggtatttctgcctctgggtctttgaggaatcacaacactgtcttccacaatggttgaactaatttccacttctaccaactgtgtaaaagtgttccttttaatctgcaaccttgccagcatctgttgttttttgactgtttaataatagctgttctgactggcatgagatggtatttcattgtggttctgatttgcatttctcaaatgctcagtgatgttgatcttctattcatatacttgttggccacatgtatgtcttcttttcagaagtgtctgttcatgtcctttgcccactctttaatagggttgtttttttcttgtaactttaagtttcttaaaatagctggatattagaccttcaaaattttttcccattctgtagattgtctgttcactctgattatagtttattttgctgtacagaagctctttagattaattagattctatttgtcaatttttgctgcggttgcaattgcttttggcattttcgtcatgaaatctttgcctgtgtctgtgtcctgaatggtattgcctagatttccttctagagcttttatagttttgggttttacatttaagtctttattccatcttgagttagtttttgtatatggtgtaaggaaggagtccagtttcaattttctgcatatggctagccagctctcccagcaccattcattaaatagggagtcttttccccattgtttgtttctgttaggtttgttgaagatcatatgattataggtgtctggtttttatttctgagttctctattcgttccattggtctatgtgtctgctcttgtacaagtaccatgctgttttggttactgtagccttgtagtatagtttgaagttgggtaacatgatgactccagctttcttcttcttgcttatgattgtcttgggtattcaggctcttttttggttccatatgatttttaaatagatttttccaattatgtgaagaatgtcaatggtagcttaatgggaatagcagtgattatataaattactttgggcagtatggccatattcacaatattgattcttctatctatgagcatggaatgtttttccatttgtttgtgtcctctctgatttctttgagcagtggttttagttctccttgaagaggtccttcacatctcttgttagctgtattcctaggtattttattctctttgtagcagttgtgaatgggagttcattcatgatttggctctctgctcacctattattggtatataggaatgctagtgatttttgcacattgattttgtatactgatagtttgctgaagttgcttatcagcttaagaagcttttgggctgagacaatgggattttctagatatagaatcatatcatctgcaaacaaagataatttggcttcctctcttcctatttgaatactctttgtttccttttcttgtctgattgccctggccagaacttccaatactatgttgaataggagtggtgagagggggcatttttgtcttgtactggttttcaaggggagtgcttctagcttttgcccattcagtatgatattggctgtgggtttgtaatatatggctcttattattttgaggtatgttccttcaatacctagtttattgagagtttttaacatgaagggatgttgaattttatcaaatgccttttctattaggtgcctattctaaataggcatctattgagataatcatgtgcttttgtctttagatctgtttatgtaactaatcacttttattgatttgcacatgttgaaccaaccttgcatcccggggatgaagccaacttgattgtggtggataagctttttaacatgctgctggattcggtttgccagtattttattgaggatttttgcattgatgttcatcaaggatattgggctgaagttttttgttttttttttttgtatctctgctgggttttattatcaggatgatgctggcttcatagaatgaattaaggaggagtttctccttttcaatttattagaatagtttcagtagaaatggtaccagctcttctttgtacgtttggtagaattcagctgtaaatctgtttggttttgggtttttttttgggggggggtttgataagctatttattactacctcaatttcagaaatcattattggtctattcagggattcaatttcttcctggttcaatcttgggagggtgtatgtgtccaggaatgtatccacttcttctagattttctggtttatgtcatagaggtgtttatagtatcttctagtggttgtttgtatttccgggggtcagtggtgatatcccccttaccatttctgattgtgtttattttattcttctttattagtctagctaggtttctagctttctgtttgtttttcttttaacagtcaggctactctaccatagggctgctgtggtttgctggggtcagctccagaccctagttgccttggtttttaccatatctggagatgtcaccagtgaaggctgtgaaacagcaaagatggcagccagttccttcctctggaagctctgtactggggcgtactgacctgtttccagcctgaacgcacctgtaggaggtggctagagacccctgttgggaggtctcacccagtcaggagaaacggggtcaggcacttgcttgaagaagcagtctggttactttttggtagagcaggtgtgtactttttttgtgctggctggagatgtgagcaagggacagctctcagcttcatttttcagtcgctgacacagcagctcatctccagaccaggaaatccttattctggcctgactagaaattgctccttttcttttaaccctgtctacttttctcaccggacctcttcagatcctctttctctggtgggttaaatcagatcctgctactgctacctggtaacacagctctgtctgggcccagagaatcaaatgggtactatcaaccacacaggctgctccagaacaactgcattccatgttgtggcacagcaggcatgagtctgtgatgaaggcatcacactcacccaaagaacagagtgggctacagttgcttaagtttattttacagtgtttctgtttaaatttagacagcagctgcctgtcctttcagttgagctcttcccatcatagcagagaagccagccagccaacagcatggcacagcgccatgctcctattccttctcaggtcctaggcttacatctggcccttgggaaagacctcaggtgaagagctatcttaggcctcactgtccagttaggaattgttccttgggtggcttacacatctccaatggggaagcagaatcttctacccagaggtagggctggatggtgcattgttgttaggacttgagagaactaagaaaggctttctgtcccccgaatattctcccagaaacttttcacactatttaggaataatttatttgtgttaacaaataatctttatttatttttaaactttttttagagacagggtctccttatgttgcctaggttggtctcaaactcctgacctcaagcaatctctcacctcagcctcccaacaaatacccttttagaaatgtttattatttatacctaaaaataggttgcttgtttatcgaatttttacatgaattgtaaaacaaactgggcacttcctagagaagggaaaggggctcacatgtcagggacaaggacaaagaggttgtctagaataacagggtatcatgcttggatggaggggtggtggggtaggggaagagcttttggcaatcagtatgtggattctgagtaccagtgactcctacatctgtattcacagtcccagattctctccagagtccaaaatccatatttataatttccctttcaatagatccatctaaagtccaatgggcaccttaaatgcagcatgtttctaaacctaaatgcatcctttcttcttttttgcccatactcacaccttttctctaatccaagcctttttgaatgtcccccctcgactcgatcaccctttccagaggttttatctcatacatttctctgctctaaccccgcactgcccatggcttctttctggctctcagtttcttcacacagccaattgcaaatgacctttttattggtctttctcccttcatctccctgtttctactttatttcctcttccatattactgccaaaattaaccatctgaacacaaatctgatcaccattctcctccaaaaacgcttcctgtaacaatctgccatagctacagaataaagtctaaactctgtagtacactacacagagcctgtctccatctagccactcccccatgtccaccactggaacacaggctttggtgacactgcttatgctctttcctctgcatgaaatggccttttcctattctactcctttcttcaccattccatcagatctagccttctctgcaaagctctcaccattccatcagatctagcataaatattgccttctctgcaaagctctctctagcttccccaggcctccctctcagcgcccagaacattttatacagtacagctcctatagttggagcactaatgtttggcaagtgtctgcacacaggaagtgctcaattaatgtttactattaaatgaagaggatactggcgaaaagaggctccaagagattacagaaggtgccagagggagaagagaaaacagtgaacaagttaaaacagcaaatgagctatgccatacacaatcatcagactggaagagattaaaaagactcatagtgcccagtgttgagggtgaaggaggaaaatgggtgttttcatttgctgctggatgcttggtatcctgattgagactgtgtagggaaattttgacaacatgcccttaaagaagatgacaggatttgacccagcacttccattttaaagaattccccttaagggaatgatctgagcagcatttggtgatatttatataaagatacctgtttatatcaataacctagtgacagctgaaacatctaactacaggcagttgactaaataaaccacagcacatttttaccttagactattaaacagccattaaaagtgacaatatggatctataattattaacatggaaggataatatttgtgatgcatcgtagaatgaaaaaagctggttataaaaatgtgcatatactatgatctcacttaaaaatattagcattaaacaatcatgaggaatgtgtattataatgttaattgtgcttgttcccagttgatggtttctttacaccgttctatattttctgaatttttgaaatgattagaattggttgtatagacacacacacacacacacacacacacacacacacacacacacacacacacacactgcaataaggctatttccactaggagaaagagcagggaaagcagccttagctacggtcggctaaccctgacttctggttcccattgtcatagcagctgcagggcatcctggctggtgtggacactgaaagcagcagagtcctcacaacccagggggagcccagttgaggaaaggctgagcattgcagtggtgacaatgctaagtgaagatccagcagtgtggcagcaacatgtgcttccagatcattccccaaaaggcatgagtcccatgccttttctgttaatatccaagctagctcagaatccactggaggatatctggaagacactaggagctaaattaggtagagaccctgaataattcatggccacagaccttttcaaaattctactataggggaaaatcatctttaaaagtctccgtatcaggaattccagtctggctgagctaaataaaacctagtggggaagctggcagtagcttctgaagcggaggacctcctcctctttcccctctcccttccccactaatgtgttttagttcatagagtgcctgctgatttccagttccattagaagtactccagagtgagtgtttgttgaaaacacaacccaggggagctgaaaaggcttggctgggcattgcagtggtgacaatgctaagtgaggattcagcaaatgtggtggcaacaattgcctcctgatcattccccaaacccacaggatggcttgatcacacctctgggccaggcaggaagtcaggagaccctattttcttggtgctggagaacagggatgctctgccttccagaatgctccgggcagcttgaaatggcatgatcccttacctgattgtgggagccccctcatcctttgctgtgcctccccctgctactgagcgtgcccactcaggctccatcgcagaccctgcagccagctactcccctcttcagcccctcagtcctccctgcagctgctaaagtggccttggcccgggcaatgagcaccccccagcctgtcccgtgctcgcagccacctctcccgctgggtgaccccatccggccctgcctgttgctactctccatgtccttcccccacccacggagtgctccctcctctcggctgcccatactcataaatctagaaggccccagaggccggcactggcagcaatttagccagagtctgtccccagagcaaattgtctgggagctctgccagcttctgaagaaaatctgctttgtgaacaggggaagaagcctcttttatactttctgctaatcacgttatttacataagagagccccgtgtgtttccttcctttcccacaagtcctcacactcaagcccctgcttgtcctggagccttgaggagacaagagcaagacgtgaacaggtggtcgactattgttcaaaatatggaggaaacgtaaaatacatgtcctgaaaactcattcagtttctcaaaaggctaaggcattttattaaacacattttcttagtaaggagaaaaacaaggctgtagcccgactggaaaatttactgcggcccatcctgagcactcccctctcttcacaaaacaaatagtcatatgaattgtgtcttaaaaagcaaactataattacagtctcttgcctataagcttgatttctctgtgatgtttctaagctaatttgatgttctctgccttgacttgtcctttcacttgtggcctttcactctcttcccacccttttcttcaaacgctggtcttttcctgtttctttccttcccagactccctacctcaaaagccaatggagtccaacagatcaagaatgactatgaatgactgaggcttatatgttttaaaaaacatggtgaaaaagtcaagcttaggtgagggatatccttcaagtcatgagttcaagaagttatgccttaacatcactgctcaccatcattcaaaacatttatacaaggcctcccttggaattgccctgaggggtggtttacaagacacacaagaaaaatcaatcttgatactttaattttgtccccacttggttacatttcttcttcatcagacttggctctaaatgacaaatcctaaatgaaaacgagtcatagccaggtgcagtggctcacgcctgtaatcccagcactttgggaggccgaggctggcggatcacgaggtcaggtgatcgagaccatcctgcctaacacggtgaaaccccatctgtactaaaaaaatacaaaaaaatttagccaggcgtagtggcagatgcctgtagtcccagctactcgggaggctgaggcaggagaatggcgtgaacccaggaggcggagcttgcagtgagcggagattgcgccactacactccagcctgggcgacagtgcgagactccgtctcaaaaaacaaaacaaaacaaaacaaaacaaaacaaaacaaaagtcactctagcaggacaaaggtttgccaccagtaacaatgcacatatatgtatatactttatttatgtatttattttgagatggagtctcactctgtctcccaggctagagtgcagtggtgcgatctcggctcactacaacctccgcctcctgggttcaagcgattctcctgcctcagccttttgggtagctgggattacaggcacctgccaccacgcccggctaatttttgtattttggtagagatgggattttgccatgttggccaagctgctctggaactcctggcctcaggtgatccacccgtcttggtctcccaaagtgctgggatttcaggcattagccactgccctgcgcgtacgtgtatatactttaaataagccctgaggacaatcccaatggaggcggtccaagattattttgtgaaaacagggcaatcttcccttcaggcctagcaccctagggcagccattttggaggaaaacatttcagttggatgtctaaattcagaaaagttgtatgttgtttatttttcatccatcttgttgccatggagggaggcagttgtggcatgtgatgtgcactaatatttatggagtgtctcctacaatgagcccagctctgagctgagcatttggtgtgcaataactcatttattctcccagcaactctgtgagaaagcagaggctttaagaggcagataacttgagcaaggttacacaaggagggagtagcagacccaggaattagatccattttgctgactctaaggccccgtttaccaactcatccacctgagttcacctgttcatgcctcccttgtgtggttctttctttttaactttcaatatttccgtgattttttttttcttcaggaacttggttccctatttttcctggattgttattaataatttctaaaagaatccaatatattttattactacagatttttgttctaacccgtgacttcacttatagatgtttctcagttacctcgtgaaggagagctctgtagaaatatttatcactggtgtaccacaagcagtttgtgttattttctttgtaaaccttatgtgaaatctgaatacataaacttattaaatcacgcgttgaccagagccataaaaaatgcctggtaattggtctctacatccagagcttggaaatctacctgtccctggggaattatacctccaaggctaacacctgaagggtccgtctctaccgccttctttagttttcttttcccataggcctttgcagcaacaatgcgtgtgatgtagttttatccacttaattgtttctttctgttatcttcaaccttttgggatgcatgccctgctctgtctttcttcctttcgtctctgctcagggtccacctgaggcagtgtctggctcttctttctttcgctccccgcccccgccaagaggcctataacccagagtgaagcttgtagggctgcttggtaaagccatttcattcacctacagccctgccccaagtctctctaagtagtcccactgctttctagcctactccccagtggctattactagataaaagtcactaaatgaaaaacagatattccccacacagaagagagacagagacagattttttaatcactaatattttttggtcttaactacagttatttacttgtaaccttggcagcagtttttgtaccactttccaaaaaaagaaagatggtgactgattcagataagatggtatcatagaggccagtggccatgaactgaaataaagaagaaagaaattctgataatatgaataacagctttgatcatgaaaattattcagggcaaagtgatgtattaggataacccatttcaaattgtgggggtttgctgtagtaactgggaaacacaaatacttgtagttgtagaacacattggtttacaagccatcaatgctcacaacaaaggaatgtaagacattggggagctctattatgtcaccattttatagagggaaaaattgaaacaaaaagaagttaggtatcttggaagggaaaagattgattaagaacacaagaacagaaaaccaaacatcatatgttctcactcacaagtgggagttgaataatgagaacatatggacatagggaggggaatatcacacaccggggccagttgggatggtggactaggggagggatagcattaggagaaatacctaatgtaggtgatgggttgatgggtgcagcaaaccaccatggcatgtgtatacctatgtaacaaacctgcatgtcctgcacatgtaccccagaacttaaagtataataataataataataataaagaaataacaataaaattaaaataaacaagaaacaacagagctagggttaatataatagttataataattaaatgacaagttcaatggacattttctcttttggtaataatacttcatgatgtatgtatgcataggaatcatatgatttttttcaatcactttagacctattcagtccagaactagaaatgaagacggctaacttttgggtcttgcctctgtgatgagctcagtcactgaagtctagccaggctatccttcaacttctttatctttaaagggttggcatgcagctgggagtggtggatggataatagttatgcatatgaaggtgttgtggtggtttaattaatattgataaaatacttgaagatcctcagatgaaagtgatcaaccaaagaaaaattatcataggatccctccctgctcctgcttcagatttttgggccaaagtaaaaggagttaacctagtctggaaaatcctgccactagaattatgatgaagggtgtagatgctaagcttgtcaccctagtgcagagtgatggtgtattttggattgctgaaatgctgctgcaaatcattgtatccccagggacaacgtcttgtcatccatcaaggctgccactggagaattttctacctcagcaactccttgcccttaaagctagcccatgcaaggaagtcacaacctccttctgatagctgatgtaatgtttctttctcttttttttttttgtgggggatggataaaaagaactaaagtctgggacacagcacaaatcggtgggttctagcagctgtggaggagagatgttaagagaaggagtagtctgtatgtaccggattctttcccccaggctggaaccaactcaactctggtcatgtgatcagaatagaggaaaagcaaggattggggctcagtggtgaggcaactgtagagatcttgacgtggaaggggctcctgtcctcactgcctggatgtactggccatggcagcactgaccactgaggcacctcaagggcctccttcccagcagtgaaaagtgcctcaagggcactccttcccagaagtggaaagtggtgtgcctgggcaaaagtagcctttcagaggagacagagaggctttccaccctcactctctcaaaattaggaggctctagtctgattgagccctgacaatggtaggaagagagtctctatgccagactttcccagagtgccccaccctcagggccatctacatcagaatcacaggagcggccttctgaacctgggcctaggactctgcattccacaagctcccaggtttctctgaactggtacagtcccctaccccactccttgttgatccaagtcctaactgaaaagttggtcccaatgaccaaaacaggctgcatttcctgatctctcaagaagagaagagccatccctgcagctggcacattgggtgactgttgcctcttttgaggacatatcttataaatttctaatcagagaattctgaggaacagattcctttgccattcctctcagccacagcccacaattcggccgagccattgacagctactaagtcagaaaaccccgggccaggcctttcttcacagtggttattttggctttacagttcaaagtctggatggcagagcctcaaggcaaatgctcttatgctcccagagaaaatgatacacatttgaccaacattcttggatgcttcctgaatctctacattttttttttttttaactaaaggaggatttctgtattatttagagcttctctaatgacctgaagtgaggtctgggtgccaataagttaagacagcttagtctttgacctgggctgaagcctctctgaaattccatgtctccctgtatccatcccatgccttccttgtctcttcatgactgagccctggcatctccccagctaaggcctatctctcctctccaatcccaactggaggcaagaggcatttaagcttccccagctcccatgtctgggaagcttagactgttggagcattgaccaaccatgggatatcagggaattataaacatctctaagccttggtaacgttatttgtgaacatgagaagaataattcttactttgccaggattaaatcagattatgtatgttaagtgtctacacttgtgcctggcacatggaaggtgctcaataagtggtgtaatgtcactcttatcacctctgggctcttgtaatctctcccccacatgactcttcctgcccatttgaccctggttacagctaaattgaccaacagactctcaggcaggaggtcgctgggtagagagacagggatagttctcaaagttctctcctaccccagcacatttttcaaaagtgattcttctcaataatttttaagataaaatgttaatgaaaacaaatgacacagggaggggaacatcacacactagggcctgttgggggttagggggcaaggggagggagagcattaggacaaatacctaatgcatgtggagcttaaaacctagatgataggttgataggtgcagtaaaccaccatggcacatgtatacctgtgtaacaaacctgcatgttctgcacatgtatcccagaacttaaagtaaaataaataaataaaaaaagataaaatgtgagtaagatcagttaagactacaattgggccaggtgccgtggctcgtgcctataatcccagcactttaggaggccaaggcaggcagatcacttgatgtcaggagttctagaccagcctggtcaatatgatgaaaccctgtctctactaaaaacacaaaaattagctgggcatggtggcgcatacctgtaatcccagctactcgggtggctgaggcaggagaattgtttgaacccagcaggtggaggctgcagtgagtcaaaattgcaccactgcactccagcctgggcaacagagtgagactctgtctcaaaaacaaacaaacaaaaaaactatgacgacaagaggagaaaggaagcaatatgcgatgcaaaatagattgagaaggtggttgtgggtattgctttttgtgtgtgttttaaacttgttttctctttcatcaaccagtaggagagttttcacatacatcccaagtccctaccctcttgttcaaccatgatggtgtccccacccccatcctagaaacttgttatgcctcttttcctagattgtgctacaggatggaagtagaaccacatcacacattcccctctcattcagcccctttcttaaatggttcagttctgctaatggacctcctgcttcttggttctaaataccaaggcagttgtattgccccactccagttcccgttaccaagatcgtagttctgccttcatccctgtgtctgaatgctaactccaggacataactcagtccccttctaccactcagacctgactatctctaactagtccctttgcccagtggcaggacctctattctccatccatcaccttttgatgcctactggctgcctccctgaacgtcagtatatctgctgcttcaattccccatggctggactctgtgtatatattaggcccccacttctagtgcaactggtgcccccatttgttggaatcccatatggaactatctgtgctccctggacacagtatcttggtgtggcagaaactccatgtcacctgggcctacctcctaccacctgtcttgccccttgatgataggtttcctcttcctgctacatggtctttatagtgaccagcagtagccaggacaccaatttctgggaataaacagctaatagagctgaaagaacatcttcaggagacaggataacagagctgctactgatgtttccaaggagacccatccgttggacttgaatagctgtgtcagggagaaccattgaggaagttgagttttttttcattaactcggagtacaatctttacctagagccaagccaatgaggtttgaatccaagggaaagccagcttccaatacaaatagaatgtgagacgttttagaaaagcagggctttaagggagctgagacactgcaaagtagttactctagtaatgcaaaggggttgaaggccagaaggaggcactttctaaccttctgggtgttctgaacccctgaacatcagggcagtttggctgctgtgcatcttaacttcatctccaagttctgtggagagaggggaaagtgcttacatggtgtatgggggaagctggaagtttctcctcctgccaaagagctgcccactggtgaaccccttgccttgaattctctcttctaaggactaaacacagctattatgcatcccaagacacactcacaaaaaaacaaaatgtgttccacctgagttgataaattctccatttacagggactggtttttaggttagctttttgctatctaggtaattagacataaggcgggtccatccgattagagacgagtaggaggaaagagtgcagtgatgcattgattaaagcattcacttgggaatatgactctggagtagaagacatcagactcggacagttagccagggcagagagaagccaacacaaacaaaatggcatctccacataacttcagaaaggaccagagtgagggggtatatgtgtgtgcacatgtgtgtatctttcagagtgaaatagatgaagtgaatttctagctgccatttgtctatattcacaaccctttagagccctgtcatcttgagtatgtaaaaaaataagtgcttgtgcttccctgaaaacaggcaaattctactgattcttagtctcaaataaacgtaaaaagctgtgggcttaaaactcagcttatttatttatttattttgatggcacttagaataaaatgttccaaattgaacatttaaaagggaacaaacaaagtaacccattatgcaaatggtattatgggatgtcgagtccctgggcaaaggaagataaatgaatttataattgtgttttaatcttccctgctggaaacagttccttgcctcttttaatctgatgccaatctttgagtcaagagatggtgactttaatctagaactttgtcaagatggctgtcaattgccttggttataaacagtcttataattttgcctccaaattgtaatgtcattttcaattccctttatcattacaaatagatgttctgttataaaaaattgaatgatgagctttgttgtatactttaagtgttatttttatgaaaaatgcctaaaatttggaactgggaaataatagaaatgattaagtgattaaggaaacaatctgtaattgacatactcctccctctaaattacattttccaatggtttatttataaaagttgaccaatccggtttggttatttccatacatacgagtctgtatctctcccctgaggagtttgctggcagacacgctaggagcagtaatgagttttccaatccagaccagctggaatcaaggctccaagtatttattctgtgcaaagaatgcaccacttgtcacatagatataaaaatccttagtgaagcattaataaagagagctgtttaccctttgtgtagctattatagaaaccaataagaatctagaaatgtaggtgtttgagtaagataaatttaattgtgtttttctcagtcataactctccactgttggtggggaagaatagagtctcaagttctgttaaattaccgagctctgatcctgaaaaacatcagttttccttccttaagacccaattacaaagcctataattataccattgtcatccaagcagaggcaaatacacttcatcttctgcaaagcaatgggctgaaatgtaattcttctacaagactaacaacaagccacagttatttcagagtcatggccatgcttgaaattgaagaccactctccaaatacaagctggctctccggtatggcctgatgtgctaactcacagatagtactactaggaagcttgaacgggggtgatgagtagctcttcagtcctccctcccaagtgactgtctacagctgacaagcctcattgtccctccaagcatgacccagccaatgaaatttttgagtagtctcagcaaaggagttcctctcggacaagtataacatacaaacaattaaggaaattttgtctaagagaaaaaaattatcttagcatattccagttaacttattttaaataacgtttgcatagaaaaaggaatttgagacttcacacggagtcatgcttccaaggcacctatccccgtggaattggtgaagcattatatcaaaacttaatcaaaacttgagatttatttaatatgaatcaaagtgtaccatgaagtatatactgtagtaaagacaatttgtctcatctcatggcacaacaaaggaatattatttagaaatcaaggacacaaaagaaatgtagatttagatgtagaccaccatccatggcaccctgtaggcaaggggatttttctctaagggcagcgaaaaagaatgctggagtcccagctagtccactttgctgagctgtgaaatcttgggcaagacatttatattctcagaagcgcatttccagctctgtgtagtggggataagtgtactaatgttccctgtaactttctcccaggggtgttataaggagtcagtgagaaaacgcatatgacactatttataaactgtactaaatactattataatggtggtcagtcttctttttattattaattttacctctgatataatctaaagaggaagtattttccttgtgacctttctcatttctgaggtccagtgcattttctctcattttggaaaattttaaccactaaaagtcaaaacgatacaagccttactccaagtattaactgacttcccacctgggatattgctgggagatttggattatcttgttgccaccatagcattgttttaccatgagtgactgtggctatttgattatagctgtcttattatagcaaattatgcatgtaattctgaataaaacagccaacagcttcagaattactcaagcaagccaagcctttgacacttcattcatgcatgcatacagtcattaactaaatttaatacataacgatttgtcagcactgagtgcagtaggaaatgaacaagatagtcttgtcctcaagatgctcactgtttcactaacaataaactaaatgatttaatacatgggaccctagatagttcttgcatttctaacacagtgcttgggatgttgtacgttttcccaaatcttttcttttttcttcccaccccccgccccctgccaccccaacggagtctcactctgtcgcccaggctggagtgcagtggcacaatcttggcttgctgtaacctccgcctcaggggttcaagtgattttcctgtctcgacctcccaagtagctgggactacaggcaggtgccaccatacccagctaattttggtggggtttcaccgtgttagctaggctggtctcgaacttctaacctcgggtgacccacccacctcggcttcccaaagtgctgggattacaggtgtgagccactgcacccggcccacattttagcaaacattttctgaaagaaatgaataaaatatagttcatcagtgttctgagagttagttttcctagcagaaaggacaaactcattcagttccaattttgagagcttagaagaagcttgagttttttaacttagagattcctattcttcctgaaatccaggacaaacccaacttttcagtcactttctccactacaacaaggaggtcatggtgatccttacactgtaatgaaatagtgtctgtactcattgctgactttgtgcagtgaagaagactttctgtggaagggtattggagagataagaaaggaatgaggcagagactcctggtagcacaaaatttgggggccctatcaccagtaggtcttgtgttagataagcccagggactctttgccacagatacatttcagtcactataaaatgggcaatatgatttgatttggcactgaattttaagagacattcactccacgcattagcaaaccttgtttgtatatggatgtacccattgtgccctaaggaatggtatttcaaaaactgctctgtgaaaggcaccattaagaaaatgaaaaggcaaacaacaaaatgggaaaaaaatattcacaatacatatatatgtcaaaaaatttgtgccaggtgtatataaagaacttttacaactaagcaatacaaagacaaacaacctaatttaaaaatgggcaaaagacttcaacaaatactttgccaaagaagatatatgagtggccaaaaaacacatgagaaaatgttcaacctcattagtcatcgaggaaacacaaattatataccacaatgaaatatcattatacatggctaaaattagaaaaggtgcagagcaacttgcattctcacacactgctgataggaatgtaaaatggtactaccaatctggaagagaaaggaagtttcttatcaagttaatcagtattattctatgatacaacaattcctctcctagatatttcattcaatataagtaaaaatatatgtctacacaaaatttgtacacaaatgtttataacagctttatccttaatagtcaaatactagaaacaccgaaatgtccatcaggaggtgatgaatatacgaagtgtgatatatccataccatgaaattaaaaatcagcagttaaaacaagtaaactggcgagtacggtggctcacctcttccagcactgtagaaggctgaggcaggtgggtcccttgagcccaggagtttgagaccagcctaggcaacatggcaaaactccatttctacaaaaaattcaaaaattagccaaaaattagccaagcatggtggcacgtgtttgtggtcccagctactacggaggctgaggtgggaggatcacctgagcctgaggaggtcgaggctgcagtgagccatgatcatgccactgccctccagcctgggcaatagagtgagaccctgtctcaaaaatacgtaaataaaaaaaataaaatgagtgaactattcatctatgaaacaacatggataaatctcaaagatattatgctgatcattaagaaaacatagatgcaaaagaacgtacattttatgatgctgaaaaagacaaatctaatctatagtaatagaaagcagatcactgattatctggggctgggggaagtgattatggtattatatagtgattcaagagagctttactgaggtgacgaaaatgttctgtatcttgactgtggagatggtcacacagacgtatacatttggtgaaactgtccagtagtataggtgtattttattcaatgtaagttgtagttctgtaaggttaattttaaaagctgacatgaaagaacatatataaatacaccaaagtaaaactcgacatcaaaacatttatgttatatacaaattgtattaaagtatttttattttactggaatataaatagctaaaatgagattggagtatataaattgaaaggaggtttatccatatattcttttaacagtcatatagtgatatatctcagagaatatgcaacacaatgtacttaaatctctagaaaacatttacacatttatgtcttttgtctttcagtagagaacagtaaagaatgtatagctctaaaaaaaaaaagactggtgtcatttttatttaaattcatggaagagaagcatgcattgctttgttgatagacgcgggcaggttaagaaacttaaatgcaaaaaccctatgcaagaagtaggtcttaaccccaaccaaaagaagaagaaaggcaggaaaaaaaaaaaaggctagcagggctatattgggattataaattttcatgcaggaggcttaatacatattgtggaattcagctcttatttcatccctaaaattttgtttctcttctttaactgaccaagataaatttgtgatgagcagaagtgatatttatgtaccataaattcctagctttgaacaaatcatatttgtggtcacatctggtttcaggctacatatttatgtaaccctttctcagagcattgcacagagcttacttaaaatgtaattgaaaatgtgggtatagaatgaattacttttaagtgtagtaatcatttaaaatgtaccaggattaaaggtcatttaaatgactcatctctggaaacataaagtgaaaagatagaattcttaatttagctgctccttagatttgttttttagcagaattttaaaagcaccttaaacatacctcatactgatttattcaagaccacacatcaaaccataagtgaattcttatgtaaaatgtcttatttctaaataccagaaagtaatctggtcttaatctcaaaatttttgggttatgaatgacatgtaaacaatatcatttttagctgtgtatcttacatgtggttatttacatgtgatgacataaatctgaagaacaggggcacgggtaaaataacaaaatgatggtcaatttaagcttaacctttgcaaataggctttctgtttttcaattagctttgttgtttaggtttctgtctaccatattgctattataaaaccctgtagcaccatgttttggtaggggcagcaacataatgaaaatgcctgttttcccttccacttttaaaagaaagtgctctaggaaatggagcatgaatttaaaagtcagtcatgtgtatctgcacctcagcatcataaaaatatcatggatttgacaaatttgcacaagtgtccctttttgggaatttgaaaagggaatgttgcattttcttttggattgaaaattcttcctatgttggaaatgtcttcagcagctacagcaaattagatttggcctagaggagtcagacctaaaagaaatcctactttggacaaagttaaaatataatacacattgaaaatgcaagacataatataaacttttatgtacagcacttacttcagcagcctgtgtactcaattggaacaatatggggagattagcatggcacctgtgtaaagatggcatgcaaatccttttatgcttcacattttacaaaaatataggttatagacatgatctgcatgggattaaaatctgtatggaaatacaacaaaatggaaacactaatcatctctgggaattagaactattattttttaacctctctgtagttttaaattttcaacaataggggtgtacaaattcataatcaggaaaaaaacatttaaacataaaatgatgtatttatacaagctgactatttgattatctgaagacaaaagcagaatttacaaaagtgaatgaaaaataatgtttttctttaagtcttagtgccttggggaaatagcttctaagctcttctgaacagaatgattttgtgaaaataaaatgttatgctacctcccagcatgaaaaacaggcagaaaaaaaaggtgccttggtggggcaagataagagccgatgaccagatgagccttccccttagcctctgtggtcctggaaggcacatatgcagaactggggcaacgctgaatagagctggaaagcaattgtctgtggctgaggattatgaactcagctatgaactcaaagacagaaacccatgcaagtgatgccttgccatctaacccagtgctcgtgacatggttgctcctgtaagtgtatgctgcttggctgtctggccatcttactttcgtggccatctggtctttgtgatgtagaataggatggtgacaaattcagggtccttcccacattgtttgctctggaactcccctaacacatgataactcatgcataggtcaaggaggcctctagcacctaagtcttacttgtgaaatgagctactgaacacatgaacatctgcaatttagggccaatttaaatttcaaagcagatttattaaagcattctgtattcagtgttacacgtttggaagtgtgctctataacagtgttgttgaccaaattgtgcatagtaaaatgcctatggtggaaagcatatggttattacaaatatgatttaaatgtgttttgcagatgattttgtgctagcaatatcagggataaagcctccagaacaatgcagggtatgggaaatggcccagctgcttagaccatgcatgcagtttgctcttttatagttgatcatttttgtacacacatacacaatatctcatatcttatgtacaaaaatatacacatagatgcatgtgatttgcagttaagaatctggaccctgaatccagcctttctaagttcaaatcttgcctctcccctttactaggcatgtcctttgggcaagtgggtttatttttctgtgccccacctccttcctctgtaaattggaggtcaaaaggtaacttataaagattttaaaatataatatatataaagatcttagcatagtgccaaaacatagtagtcactcaataaatattatgtattatcattttatcattatatcgtatttattttctagaaggaattatgcatgaccttagtaggtgttttgcggggagcgggacctctgggggcaaggagaggtcctttccattctgtactattctctaccattggatttgctgttctttcatatacattacttttttatttttatgacggggggggtctctttgttgtttaaagaaagactttagacaaattaaatttaacagcatttaactgagcaaagaacgatttgcaaattgggcagccccctaaacaagaataggtttagagactctggtgctgccacatggttggaaatttagggatagaaaagggaaagtgatgacatacagaaaatggaagtgagttacagaaacaactgggttggttatagctcggcgttctccttatttgaacagttggccacttgtgattggccaaaactcagtgattgatgcaagagtaggttgcagtctatttgtttatccaattaggtacagttcactatgttcagaaaagcctttaggccaaatttacaaggatgcagctttaagctaaacttaatttaactttgtgcagaaagatttttacttctttttctttttgtatctctctattaaaaaacacacaatccaggattgtgtgttgggtgggtgggtgggtggatggagagaaagagagagagagagagagacagacaaatagaatagatagatagatagatagatagatagatagatagatagatagatagatagagacagatgataggtgggtggatggatggatggatggatggatggatggatggatggatggatggataaaggtttttaagtacaaacagaagggaaaatgaagctcagacttgttttttaaaggcccttctttatttatttatttttatttatttatttttttgagtcggagttttgctcttgtcacccgggctggagtgcagtagcgaggtctctgctcactgcaacctccccctcccgggttcaagcgattcccctgcctaagcctcccgagtagctgggactacaggtatgcaccaccaagcccagctaattttttgtattttagtagagatggggtttcaccatgttggccaggctggtcttgatctgctgaccttgtgatccgctgaccttgtgatccgcctgcctcagcctcccaaagtgctgggattacaggtgtgagccactacacccagcatttttaaagacccttctttctttacaagatgttatacttttcactgcttaatttgaatccctagtaaatattctggtggaactccctttctcctgcctcctcattttgtgttaattgcatcaccataacccctgaccttactactttcaactcatcttccatttcttctggaacacacacttttttacaactggaaagttgtaaaatagaaaagattcattatttttactcttctaaaagaaggtcacatgagtcacttgagggggtccactgtgaggcacagactctgccctcaggaagttgacagtcctttgaagaagatgaatgagtaaccatacaagtgcaagatgttaaaaccaccatgaaaggggtgagctcagagtcctggcagggcacaggaggcatccggaaggaggctaaggagtgacatctattctgggacactggagaacaataccagtgagctgtgtcttgtacaagtctgagtagtaagccataaattgatcttcgcttcttaacaagtcctcgcccagggctgccctgctcttgatagggactatgctctgtagcctgaactctaaacagctgcctagaaaccagagctgaagggatgcaagagagaacaaagtacttggcattcactcaatgatttcctttaaaggtggagcaagtactgtccccagatcatgtctcctcacccttatcacctcggtgtacaggagttgcacctgccgccacctctttgtttgaaggttttctctggtctctggaacccactttgatacccacttcatgagcaagaaataccagggaattaatattctcaggagaatcccccaatcaataactgacaggagttagaatataaacatcccagctcccttgccccttgggtgggatgactatgaagtttgtgtttccccagaaatgagctcccattgaccacagtgataggtccctgtccctttgctgtctcacttttcctagtcccctaataatgctcttttcaccttccaaataagcctcttacactaaattcttgtctgaggcaacccaacttaagacccatgagcaagcccatttgcaaacaaacacaacaaccactttttatattatcctacattctccaccactctcatcagatactgtctctgtttccactcacggacctgtcacagtgctcagcacaccacaggcttgccgctttgcctctctcgttgaattgtaagggctttgagaacatggactctgtctctcatctttctatcttcagcacctcagtaaagtcttcctaaatgaatttcctgtgggttctgcaatcttcctcagggagaatgtctcagctgaagacatattactaaatacctggcaagaaggacaaggtagatgagtatgggaatgatgtcctagaaggaagagaggaaagaagtagccctgataatgtatccacaatcaaatgtaacccctgcccatgggtaaagtacacacattactgtgcttcaacctctctgtctctaaagtggagattaaataacacttgccatgatttagtgtaggaaaagtgctttgaaacttcggaaagactctatatgattaaagaagtagccactgttccattatttaaataatctcattggcaaaggccatgcattagtcatcacagcagagttttttatgttcactgaacatctttcatctgaggccatcaccatggtttataaacattaactcaacatattcctcaggacaacatccagactggtcctttacatgaatgaataaactgaggacgggaatggctaaacagcttgtccccaaacatccatagttggggccaggcaacaggttaccattaggcaagttagtaatcaagagatagccttatataaatatttgggtagatgagacaaatagatcagataggcagacccataaggaaaatagtactctctcctcctttccctgcttctcatagaaacaacattcccaatggggtctctagaaaaacctccactgaataacaggtttcatgaattatgaaaacccctgcaaaatatgtcagagttgctttatgctcagcagcttctctgtgcatcccataggagcccatccaagtggtcctagatttttcatgcttctgacaataaaactaactgtacctttcagccagataaagagggaaggctgctgtacctttatgagagacagatggtgaggcatacattaacatggcttccactgcagtcaaatatgatccctctgttccagcatctggtctgcaaacacagaaggactccttcagtgaggctcagtggggccaggctgaggtgggaggatcacttaagcccaggagtttgagagcaacctgggcaacatagtgagacccccatctctacaaaaactagaaaaattagctgagcatggtgcctcatgcctgtggtcccagctactccagaggctgagtccagaggatcatttgagccccagaggtggaggttgcagtgagctaggatcatgccactgcactccagccggggtgacagagcaagacgctgtctcaaaaaaacaacaaacaaacaaaacaagaaagaaagcagactcagctcagtggcaaaccccactggtggttaggagttgccaattcccacttttgccagtggatcatccagctgaggggtagagcaacttgtgttctctccccagctggccctcagagatcaccaaaatcagtaatactacaatgtgaagcacaaagcactaggagcactaggaataggcagattttccacctggttttgcctgctgttgtggccttggaaaaatcacttttccttcctgctttttgggctcccacaactataagatgaggaactttagctatatctctaatcttccgtatgtataattaaacccttgcattccagaattttggggagcccattagaaggtccccaaaggtaaaacaccaagatccccaacccagctacaaccaatggttttacttttatctctgtcatttatatattgggtttccatgtgagattgcattggggaaagagggtaggcttgtgtttgctcaaaaaaaaaagtttgaaaatcactggtcttagtacctgctttttctgactttgaatacaaagaggaaatcatttgatagttctgatatcctgtggttcttttatatcagagcagaatggaattgaaccatgtccgtgcagagaaatcttccagcaaaactagccagtgcatcaaagagctcccaggaagcttcctagaatcaacaacctctcaccccttaacatcccccagtttcctcctgccactaaggctcagtagagctttcccatcaaagggtgctaatctctcttcttctgttaacttaattggaaagcatcctccagtctatgagccccatatctcctctcacaggcagacacttactataactatcataagtcacgctttccaaggcacacaagatgaatagttggtcttgggggacatgctgacagaacagccctgcagacctagaaacatggtgttttgtgttttcagttcatgcctttcctctaaatggggaagaaaacactttatagtgtctgaaagcatatattatggtgctagacttcttgggcttaaatcctagttgtacttcttactaactttttggccttgggccagtttcttaacttttctgtgcctacgttgacacatctataaaaagagaataacaataatcatgaaaatgcctatctacttttcaggattgctgtgataattaaatgagctcatacatgtgaatgcatgtaaagtggttgatgtttaataagcactacagaagtgtttgctaattaaaaatacataacacacatatttatcatcatacacagagagagagagagcgagcacaactactattgttcaggcactgtgctggccaggcattttatcaatattgcttttatctgtgtgtttcttatatatccagtagcaatcatttcaccctagtggatcaggaaaaagaactgaaatttctacataagcaagtagtaaatataaaattgggaattttgttccctagtcccagcatctcccgatagaccaccctaccttgagagacacgtgtcttaaacatctcacctggcaaaagcacctgaggtgatatctcataacagagaacccacacagccatttttaccctttcttccagttaaagtgaacatttcctgtgactggaaatcagttagctatggatgaaagaatggcacaaaccaacaaaagcacgttctgagtatcagttagtttgtatggcttgtgacaagaatctaagagagagtttagttctcattcccagctttgtgataagatgcccttggtggccatctggctacaggcaataatgcctgcaattgtgagctggagccagctcctacaagctcatgagagacagctgttaaatctcaggatgttttgaggatgttgttaaacacagccactgttaaaaattacattatgtaaatgttcattacattctaaagaaaggtagtaaatactcagttaatcatttcttaattattttactgcattttgctattacctatgttcttgaagttactcacatcgattctgtctgtatggtggacatactacatagtgatgggttactgtagctctcttcccagctccactctccgtggcgtcacactggaagctgaaatggggccatgtttggagtatttataccacagaaactggcaaatgccacaaatcagagttagatttattgttttgttggttatgtagtcttaagaaagtaacaggtagatattaataaggtagattaaatgtaaaagtgtgttgcatctacctcaatatatttatttatttgtgagttactattattattattttaatttgagacagggtcttactctgtcacccaggctggagtgcagtggcacaatcttggctcactgcaacctctgcttctggggatcaagtgatcctcctgcctcggcctcccgagtagctgggaccacaggcatgcaccaccacacccagctattttttttttttttaattttagtagtcatggggtctcaccatgttgcctaggctggtcttgaactcctgagctcaagtggttcacctgcttcagcctcccaacatgctgggattacaggcaggaaccaccatacccggctgcaagatatttattaattagaaaaggacaaacagtaactttacagttcagcgttctggcagataccaccttaacaaagagattgtcttggtccattctgtgctgctataacaaaatacctgagactgggtaatttataatgaacacaaatttattggctcatgattctggaagctggtaagtccaatgcgccagcatctggtgagggttttcttcctgcatcttctcatggcagaagggcaaagagggtgagggagagcaaaagagtaaactagtggcctcaagccctttcataataggcattaatctgtttataatggtagagccttcatgacctcacctccttcttttaggccctacctcccaacactgttgcattggagattaagtttccaacacatgcttgttaggggacacatttaaatcctagcagtgattaaggttatcaccagtaataagatatatcaacatcatgtaccccttgataatgatgtgcttagaaaggcacattacttctgaaatattcttgcataaaatgaataactttaacataatcacgagaaaatgtcaaacaagccaaaattgagggataagcaacaagataactgaccattattttcaaaagtatcaaggtcctgaaagactaggacatattgaggtattattatcacagccacaaggagaaatgacaactaaatgcaatttgggaccctgataatctgaataaagtctgcaatttggttaatagtacggtgccaatgtttattagttttgatcattatcacttaactgtgggtctaacatacttcaaaagaaaaatgtgttgtatctacagccattacataatgaatagcacaaaaaattgaggaaatattcttcccgtactcaacaactattatcaagttcagtttgacaaaaaattttctcatgttattgtggaacaggtgaagttctttcatggtctttgctgttttacttttgctttactcattaacataaatgaaaatgccaatcaatattcatatcagaaatacattcatttgtcaattgcagccataagttggctatggatatgagactggcaaaaatcaacaaaagcactctctgagtatcagttaatttttattgcttgtattagcatttgtatatgtgctatccatctattatatcagtaaaatttataataaacatatacttcttttccagggagtcagttgttaaacatttaccaccacatcgctgaatatctgtcaaaattattcatcttttcttctctggggctttttaaaagaaattattggggccaggcgtggtggctcacgcctataatcccagtactttgggaggccgaggtgggcggatcacgaggtcagaagatcgagaccatcctggctaacatggtgaaaccccgtttctactaaaaatacacaaaaattagcctggcgtggtggcgggcacctgtagtcccagctactcgggaggatgagccaggagaatggcgtgaacccaggaggtggagcttgcagtgagctgagatagcaccactgcactatagcctgggtgacagagcgagactccatctcaaaaaaaaaaaaaaaaaaagaaattattaaatatgcatttttcatattctgggattgtgtctaggaatcatcttgtgattttgctgacaacaattatattcattcagattgaagagaaaatgaataaaatatattgtgcccaccccagggtccatgatacctcactgatcacctgctactgattatattagcagtcatatgtctttgagccaattttccacccaggtggaagtgttaacacaaaacatgacttaaattagtaaaaattttgttttgtgtgcttatttcataatttcctgagtctgaagacgtccttcctatataaacaaccacctacattgactgaaactcttgaggacagagtttgtacttagttctgtcattattttcagaatcatttttctctttttgcattacaagcttcagatctggcccacaaactgaccttctcaacagtaatagtagtaaggagacagagctcagtcctaagttatcctaaagctcattcaaccccattttgtaaatctttgtcaacccagtgctcagcacatggcctggcacttagtggaatgtcagtgaatgttgtcaatgtcatccagccctttgagggctgcaatactgctattagctcactctgaataatgtatctttagaacagtccagaaaatgttatgtcctacaaccaataatggtctctgcctcctccatgtcttgccaagtgcttaggtcacataccttttgcagctctcttgattttacctaagtgtagcccaatgacaaagagaggaccattcagaggaattacaatgccagatgaacaaagccaagacctacttaggtttttgctgggcttcgaggagtctgggtttttttctggggtggggcaggctgatggtagggaactgctctgctagagaggctttggcaattactcagagatgtttacaaggatttatttcttagagtggtttgatttccagaaaaattgcctttaaaaaaagctggataaaacaggttccacattacacttgtatgagttgtcctgaatggcataaattatttttcctgaggctattagctcagagtctgagcaacacactggtgtttttacaggagtctaatgcatagagattacggctgactctccattttatataattcctgacctagtactgagtctcaccaaatgttgatgatcttcaactcattcagcaactgggaaataatcacattcagacatttctaccaggcttgtcatagctactaatgccatcctttaaaaaggaaataccttctgaaccctatcaataaatgtaaaaaagaaatacccttctgaaccctatcaataaatgtcgtggtctcaagatgacattgccaggcccttagacccaggtttcctgtttcctcctaggatgccacccctgttccactttcagagagcgtctctgggtcttggctgaggttgtgcctagtgagttcttgtcactgcacactgacaataactcccctcacttgcagttttcctggtgggctactttcttcaatgtggatccttttatctctttcaattatagtaagaccaataggaagaaagtcttttggggaacagcagaattgcagcttctaggtgggtggggaaaggacctaattcacagccttgggttgactggttgttgcatgtgcctgggcagctctgccagtgccttgcacaaccaaggagtcaagtctatggagggtgggggtacacagggaactcaccctgctcctgtctgcctgtagggacagccatccacatagttcaaacggctgtagatctcaattcattctaaagtctactaactggttatgttttctcgaaccacatgcttaaaccaacttcttccacataagcagcttttacccatataatatcactattacagggaggaaagattttgtcactctacccatggtaatgtgtgatgtagtcaccagtcctcaaagcttaattacaacagtgctgcatgattggagattgagttgtttcttatgatggttgatttttttattggacaagggcttagagcctagctataggaagttgtttcttttggatacaatcctagaagttttccttttaaaacattctttctacctttcctattttcaatacctatcaggtctatgtaaatatcaccgtctctctcttctttgcccagacagctgtcacactatttagcttttccttctataacattctacttaaagaggttgccagtgtcactttccctcctctaaaactggggattaaaattcccagccttccagaacaggtaaataattgctttgtcatgagaaaaatcaatatctgctaccacaggaagtcgggcaggaagcagttggacaaaggcctgcacttcagctgtgcagcagagtcatttgtgtgaccccaaaggttatgctttcctgcttgttttacaaaaagctgatgagccaggcagaggaaccagagtccagataggactagaagtatgtgccaggtactctccagtggagaacgcagggccccggggcagccgctcaattagatgtattgttgacccaaggtgagattcaagaggagataaagactttcagggaaagggaagagcagtgagcagttcacccacattccccaccaaaagtgaactactcagatattttgcagttttctcttctaatgctcagggagctacaaggacattttgagcctattcagtcatcttttgattgaaatcagggaaactcagtactctcatggcttccagggtcctcaaacctttctagccccacttaaaaaaaatagcttattgaaatataatttacacacataaaatttgtccctttaaagtatataatacagtggtttttaaaatatattcacagtacgtacaaccatcacacaatcaattttagaacacttttaccacctcaaaaagaaaccctatactgtttaccaatcataatcctattctcccctcaccccatccctaaacaaccaataatctattttctgctctatagatttgcctattctggacatttctactttctatctccacagatttgcctattatggacatggaatatgtatagtcttttgagactggcttctttcacttggcaaaatattttcaaggattatccatgttgtggcatatattagcactgtgttcctttttatggccaaataatattccacgatgtggatataccacattttgttgatccattcaccaggtgatgcacatttgggttgtttccattgtttggttactatgagtaacgttgctataaacattcatgcacatatctttgtgtggatacatgtttttaattctcttggagtgaaattgctgggttatatgttttgaaacactgacaaactttcccaaagtggctgctccacctaacaatcccaccagcaaggtatgagggttccaatttatccacatccttgtctacacttattattgtctgatttttttattttaagctttcctggtggatatgaagtgggtctgatttgtgtttcttttgtgaataatgatgttgatcatcttatcatgtgtttattgaccttatcattaaacacatcttgtcatctgtttattctcctatggtaaaatgtctatgcaaatccttgcccatatatatattatattatattgcattatattatatatatattttatatatatatatatatatagagagagagagagagaaacagggtctcaccctgttttccaagctagggtgtgttagtgtaatcatgaatcactgcagcctcacctccttggctcaagtgatcctcccacctcagcctcctgagtagctgggactacatgcccatgctaccatgcctagctaattaaaaaaaattgtagacacagggtctcactatgttatcctggctaatcttgaactcctggccccaagtgatcattcctgcctcagcctcccaaattgccaggatcacaggcatgagccactgcagctggcctcttgcccatatttttaatttatttatttattttattttttttagaggaagtctcgctcttgtcccccaggctggagtgcaatggcatgatcttggctcactgcaacctctgcctcctgggttcaagcgattctcctgcctcagcctccccagtagctgggattacaggtgcctgccaccacacctggctaatttttgtattttaatagagacgagatttcaccatgttggccaggctggtctcgaactcctgacctcaagtgatctgcccgccttggcctcccaaactgctgggattacaggcgtgagccaccgcacctggcctcttgtccatatttttaaaagtttttagaaaacatcttactttctagttatgatcattcataaaccagctgagcagttttagggagaacactttacatggtggagtgatatggataatggagtttgtttaatatgtttgggtggatttcttttaaataggctttttaaaaagcagctttaggttcacaggaaaataggaaggtacagagatatcctgactaccccctgccccccacacacagtctccccaactatcaacattccccaccagagtggtacattggttaagactgataaatctacacagatacattatcatcaaagtccatagtgtatattagagttcgctctttatgttgtatattttatgggttttgacaaatgtacaatgatgtgtatccaccattgtagtatcatacagaatagttttactttcctcaaaaccctttagtgcttttcctattcttcctttctctcagacattgatctctctgtacttttgcattttacagagtgccatctagttgtaatcatacagcatgtaacctttccagaatggcttccctcccttagtaatatacattgaagtttcctccgtgtcttttcatggttcaatagctcatttgcttttagtgcagagtatttcattgtattggacggaccacagtttttatttatccattcacgtactgaaggctacctcggctgcttctaagttttggcagttatgaataaagctgcataaacatctatgtgcagaattttatgtagacttaagttttcatttcatttgggtcaatcccgtggagtgtgatttctggatcatatgataagagtgttgtaagttagttttgtaagaaacagccaaactgtcttccaaagtggctatcctattttgcattctctgtagcaatgaatgagagttcctgttgctccacaacctcaccagcatttggttttgtgttttggattttggccattgtaatatgtgtgtaatagtacctcactgttgtttaaatttgcaattccctaataacgtaggattttgaacatcttttcatatgctcacttgtcatctatctgtacatcttctttggtgtggtgtctcttcatctgctcattttttcacttgggatgttcgttttttattgctgacttttaagatttccttatgtattttgaataacagttctttatcagatatgtcttttgcaaatattttctcccagtctgtggcttgtctttttgttctcttgacagtatctttcacagagcagaagttttaattttaatgaagtctagcttatcaattatttctttcctggaccatggctttgatcttatatctaaaaagtcatcactgcacccaaggtcatctagattttctcttgtgttttcttccaggagttttatatttttgcattttactttcagatttatgatccatctcgagttaatttttgtgaaaggtacaaagtctgtgtctagattcatatttttgtatgtgttaactctgtacattttaaaattgggttgtcttttttattgttgagttttaagaatatatattgtagttataagtccctcacttgacttatctatgatatgagaatattttgtcccattctgtgggttttttactttttcggtggtgtactttgaagcacaaaagtttttaattttaatgaagttccatttatcaattcttttcctttgtcacatgtgaatttggtgtcatagctaagaaatcattgcctaatccaagaacaggaagatttactcctgttttcttctgaaagctttatagttttaatgcttgtatttaggtcaattatatgttttgaattaatctttgtatttggtgtgagatattggtgtaacatcattcttttgaatattgatattcagttgttctggcgcaatttattataaaactattctttccccataattttcctggcacccttgccaaaaatcaactagccacctaagataatagggtttatttctagactctcagtgctaccccattgatctgcgtgtctatcttcacagcagtaccacaatgtcttgattactacagctttgtggtaaggtttgaaattgggaaatatgtcctctgctttttcattttaggatcatcttgtctattttaggattatcttgtctatttctacaaaggaataatctgggatattgatggggattgtgttgaatctgtagatcaatttggggagttttgcgttcttggatggttcattgctagcatctagaaatacaatggacttttatatattgatcttgtatggcaaaacctggttggactcaggtattggttttaatgggctttttctatttttgatgggtcctgcttccactttgcactactctcctcatttctgaattccaccgtttttgaccttttttcaatttctctaacacactaagctcccccttgtcacagggcctttgcacatgctgttttctgtctggatgtcacccttctgaattcttccacctagttaactatttttcacctctccctccctgagctgcccccacctcagtccatgtctgtcccttttgggaagccatcatagtactgtgtttcttctcaacatttaccttagcttatgagctcatttgtgttatattttgaccaatgtctatttccccagcagacagtaagcctctgtttttctcattattatatttttcaacatctacatagtgcctgacacatagtggatgcttaacaagcattttttgaaagaaaaaaatgaatacatagatagcattgggaacatgcacctatcacaaagaactttgggcaggttggtagggggagcaaatttaaagttgggcataccatctatgtaaccaattctggcttccttctgggcaattacattccagaatggaatgtgattgtctgggagagcagaggcattgagtatgtagccagtaacgtggttcccccaacccccacctttctctctctactaaagtttcttgccttgtggtgggaaacccagaaagaaaaatccagccatctgagtcatttgcagatgacttctttgtctgcttcttacctttcctgaggtacagctgacttatgagggtggggggagtagaggaaggtggggagttgaaaagattcatttactttccttaccaaattagttcactctaacaaaaatagggaaatccccaaccagctgttccagtgactagcaagaaaaatattctcttggaacactccaacaaaaggcacactttgtgtgctggctgtcttaaaaagaatgctttagagccttccaactattgcccaccctgaatgctttataaatatcagtggcaatagttagaacgtgttttttttcttaattgaaattctagtgctttggtgatggcatagatccccagaatcaggagaaacattgagggtgatagggaaccaagagaagactagctcaggggccaaaaaaatggagccaagatatggtggggctgccacttgttggtgtgtgacaaactttctgccctattcttggaatccatgttccagttgtcaggccggacagaaggaaaatgtttgcatacagagaaagaaggttgggaagtagatatttttcactttgatgtatattttagatgttccttatgcatctgaaatggggttttgcttcaggtgttttgagaccttttacccgtggtgaaatattgtattgtgaaactgcgacaccatcatgataggggccgtgctgttttgtctttgggtcttcattggctaccacaatgcctggcttagagtagaggctcaatgaaaattggacagaatgtcttaaataagatgattcatggcaaacttgctttgcaaagtagattttacagccctgtgaagtaagctcacttcctgtgttttttattttgtcctgaggctcatcctttttatcttctgtgccacaagatacaaatatttatagtacttaatttttagttggagtagataatttattataaataaattccatgagcaaataaatgaaataattgttttgctgtcaataaaatttaaaggaaaatgattcaaaagtgaaaaatatagcttactagtcatggtttttcaatgctttgtcataggaaattttaaaatactaggaattcatattgaaacaagaatggaaaaggaagtttatgaaagcacaatactcaaatccatttacttttttagactaatatattaaggtaaacaccatgcaagaagtaccctctcttaactttcctcctatttcagaatacttctctattaaaagaacaaaattacaacttgagtcccttcttctgaactctgcaatttccctatcagttatgttgatgtggggtgtcttagagcagaggtttctgagtactcataggcaagtttccagttgcttcctaacaatattgcctgggacaaaatagagacagaattctaagttgggatgactttacttgagttaaaaaatttgcaaattgttacaacctaaatgggtctagatcattgaacttgggttttcttagatttcctctattctcaaagctttgcttatcatgtacatgctattttggttccataaatattcactgagcattgactgaagtactcatctagattctgggaaaagggcaatgaataacacacaaaactcctcttctcatggagtttatatcctggtagagcttattattttccctatagtaaaatgaaataaaaacagtataaatctcacagcgctcctcttaggattcaatggcggggtagggtaaggaggtggaagacaaaaactgagagacaaaacatctgctggcttttcaaggatcttggctgtgtacggatgtaagaaaaggttaagggagacccattgttaggatgcagacatgtaggcatggtttttaggtggaagggaggaagcactagaaacaaaaattgctgaaaacatgagagagaagaaaagaatgaggtcaagagtataggagagattaaccttgatcagggaacagaattgtgactccagatgtcacaggaagagttctgagtggagagactgaaggtgtttttatgtaactaggccctggagttgtgtcatttaaagttgtgaatggtttcccatattaagaggtaggaactttgaaggttaatgtgtgatgtccctgaggcattttcctggctagattatatggtataaggtttttatcatggaagtaatttaaatatccctagaaacagtacaccaatgtttctcagagtttgttcccaataccacctgcatcacgttactgtggtacttattaaaactacacgctcctaggccccataccaggtgcttcaaaataggatctctggaagctgaactttgaaagtttcatttattattttggtaaaatacacacaacaaaatttcccattttaaagtataaattcaacaatagtatattcacagtgttgtgcaaccctaatcacaatctgctttcaaaaacattttatcactccaaaaggaaatcctatacccattaagcagtcactcctcattctctcctacccgcagtctgacaactaccaatctgctttcagtatccatggatttgctcattctggatattttctataaatagaatcatataatgtgtggccttgtgtgtctggcttctttcacttatcataatgttttcaagattcatccatttgtatcataatccagtgctttcttcctttttatggctgaataatattccatagtatgatatgccacattttccttattcagtaatttggcaatagacatttgggtgtttctttcttttgtctattgtgaatagtgcttctatgaacatttgtgtacaagtttctgttttaacacttgtttttcatgagtatatacctagaattgctgggtaacatggtaattctatgtttaccttattaaagaaatgccaaactgttgtatacagtggttgtaccactttacgtttccaccagcagcaatgtggttccaatttcttcgtgtcctcaccaacacttattatactccatgtttaaaattatagccattctgagtgagtgtgaagtcgtatatgactatagttttaacctgcattttcctaatgactagtgacattgagcatctttccatatacttctcagccatttgtatatcttctttggagaaaattctatccaggccctgtgcacattttttaactgcattgtttgactttttgttgttgggatataggagttctttatataatttgcaaatattttctcccattctatgaattgtcttttcactctgttgatagtatcctttgatgaacaaaagtttttacttttgacaaagtctaatttatctgttttttattgcttgcagaaaggcacccaagttgattatgatttttatgaccatgattatagcagtaaaacaactaatcttgcactgacagtattaccaagatcctatctgttgaggatagtatatttctgatagctagatttgctttaggtgtatatatgtaagagtatcaaaaattatgcccattcatttacctgtgtctttttcaattaaaagatactttttattagcataagtatttccctttaattttgattataaataaatttcatgccttatttagaagggttaaagaaaaataaaaaacaaaactgctaagtagaaattgtttagctatcatgacttacctgttatagtttcattggtctaagcatttacttttatataatctgtttgcatttcacatttactttgctcatcaaaaatttattgagcatctaccacatgcttgataatatgccaagcaccaaagataggaagataaaaagacctgatctctgtactcatggttttcaccatcttgcaggacacaagaacatagatgctgaaaagattatactacacaggagatttctataggagaatgagactaaagtgctgtgagatcacaaaagaaagaattgcgaactgtattcttttggtgatgggaactcaaaagaattattttgggcaagggagttccatgaactcatttaatttttttgaaatgtaattctggcagcaatgtaagcgtggaccgaactagaatagaccaaaatcaggcagtgaagtcagtaagaatgggtactttggaaatgaattcgcaccatactcttgttcagcccttagaattgttctaaaatgttttagatattgctgtgacgtaggtttcttgaactcttattggggaaagtttcaaacatataaaaaattctttcatgtaccatcagcacagcttcaacagttatcaaaaacatgcccagtctcatttcactgattgtcccccatagcccccttcccaggtattttgaagcaaatctcagacattatattatttcatctgtgaagatttttatgtaactccaacagataagaacgcttaaaaaatatctcaataatattatcctacctaaataaagttaataatactttattaatggaatgaggtttttaaaacttaaggatttatgtaaatattcacatataaaattctgtattatttcttatggagaatttttttccttaatacctttggtaagggatgcaggagtgattgagtttcttaaaaactaaaatcgttcttcttcaaatacatacaaaatatacagttctcagagccacatcagttattagctcttttattacatgtgtataatagggaagtttctactttgttatatactcatagtttgaaaacaatatgtataagttgagctgttgaggaattttcctttgagatttttttttactcaataataattcctcacgtttgtgtcatgccttgaattctccaaagtgctttcatgtctattatctagtgaactctgagagttctgctgtgcaaagacgtctattatctactgtttacagttttttttttaatcaattttactttgttgcggcttttgggcttggaatgaaataataaacaatatatgcaaaatcctctacttgcgagccaagagagactttgtagtcaagcctgcataaggatgaaaggaaattagtgtaacatctcatcagttataatttacttaatcttctgtagtatgggaatatttggcatttatacacacacacactacacacacgtgtataaggattttaaatccataattacaactcagtattttccatgggctcaaaacccacctataaatttcccgaaccatttggaaagggttgtattaatagtaagattaagaaacatggcaacacatgaattaggaagggtttggggctgaaacattccaagagatcactcataattgatgccccatcctttttatcattctttaatttttgttaacgtgcccagacatgcactagacacagttatcttcaaaacattctgtagtagaatagcttggtgtctgttaaccgaagacatgatacaagcatcatatttaatatcaacttttgctgttcacccataaaatacagaacattgaagcactctttttaaacacagcaaaaatctgccccatgattagaaaggagtacagaggttgacactccactctgtactccagaggtgtgctctggagtagtacaaacgggtttacaaactgctagagttaaggaagctgcatgatctgtcttccgatttagtttcctgcagtggtggactggagtctattttacctgatccaaagagctgatgttaaatatgcaagaattttgcaaactagtatttaaactgtcagttgcttgaaatcagccagggtgggagtatttacaccacaaaaatgagtcaactgtcaatctggcttccctctcatcccccagagccattttaccagcacaccactgcctcccgggtaagtttaaggataaaatgagttagtttatgtaaagcgcttttcatagagctccccatagacaaagcattcagtaaatgctagctaccattattgttattattatttgccattgaaaataaatgcagccaactctcaactgtttatcaaattgataaatcatctatgtcctatgtttgtttgcttttgtccctatttgacaattttactagcagcatacaagggaatatgttcgggcataggaaaaaaaagcagtgaaatcctaatcaatccatggtagtgcttattattatagcattgtgatcttgacaaaatatttgctgagagagaaagaattaaagttgaaaaaaatgaaaatgggattatatctaaatttaaaatattcactctatttttgtcttccttaaaacagctcatcgaaattccattataaatagaaaatgataaaataataattttgaacaattgtagaaaaatatgacaagtctgtatttcagtgataaatcatagaattcctgacacacattatcttaggccaaaaagggaattattggttcttgtaaatctcaaaggtaaaaatcaaaggataggtctgtgtttgaacacaccttgatgcaggatcacattaggccatgagtgctcggtttctctggcttctattagattattgctatttccagtctccacgtggcagcctcagcagctccaaactctgcctttaaagtggaatgctcttcccaaaatcatgtctctcaggaaagagaaactcttttttttttctttttttaaatagttcctgtaaaattcctgaagtttattttgattgatctggctttggccacacatctgatgccagtttgggagaatatctaatggggtaaaggtaatttatttaaaaaaaaaaactgtaagagtatatctaacagggtaaaggtaatttgttccccctccccatcaaaaaaaaaaaaaaaaaaaaaaacctgtggtgttattacactaagataaaatggatgtcatgcaaccaaaatacaattgtctactccaaattatcttcattgtaattgaattcatgttgatggcaactcatgtatacatgtagagctagcacactgctttctcttggaacacagttctgataataaccttctcagatcaagtttcagcccagggcacttctgaagccattaaagaccctagtcataaagaggcaaaaatagagatagtatcactacaggaactaatttgagaaacccgggtaaaagagtgttttaaaaagcaaatgctagccaaaaaataatttataacacctcctgccaggcaaagttcaagtttcagctaataggagaatattcctggtatgatctcggtgccttccttaaccaagaattagagccccatggtacaatgaccttagaaattttgaaagcagtagcaccaggaaaagtgagaggtcaaaactctgtgtgttctgtaatggacacaaacctgttggcatttaaaaattccacagtgttttgctgtcaaatttgttttagaatttcatttcaggaaagtaagttctaactctaatgttatggagaagtttaaatatttataccagaaaaaataaaaagcacaaaaccctctaccctagagtctcaaccattgacaagttacataattctaacgagtgtaaagtatcaagctctgtacatcttgctctctgctgggaaggtgatgcttctgtttctcttggctgtaagtttgtttggcctgagctggatgtcagcctgattcctaaccctcctcatggagtcacaggctgtaatgcatgagtcacagaggttaaaatgcagccttttctggtttatattgtatgtggattctgtaatagtcttggaatagtgttctgtgattcatatcctagtctggtatgccttagccaaatgcatctcctggtctggtgatgtatattgagagccctacgacgcttattgagtatggagtgatttaaggaaaccatttttctatcccctgggaactttctttcttataatatcccacccaaatgtgatttgtttaaaacattgtgatgctcacctttatcttcaccattaaatatgtcatactaaataatcttgtggccataccaaggaaacaccaaatataagaagagcatttattttacaaaaaagaggagacacatctgtaagtattttggagggtgagcatatttcccgaagatcttgagattggatgttggcaccctgtgtggccctgaaaaaaaaaaaaaaaactatcttgggtcttttgtaattgaactagaaactgtaccaacccagagtttataaacagtatcatataacattcattttgaaatatacagaaatgttaatgaggtgatggatgtgaaatcagcttttactaagaaatacaatgtgtgcccgcatcaagcagtgggaataattaccaatttattttctcctatgaaaaaatgatactcagacattagtgggatcttggaaagggatctgcgttatttgtggaagtatcactaaggctaaacaactgtggcaccaaaggacaggcagcataattttctaaaatatagaaaaatttaaaagaggcattgccagaaaataaatgagaatgttcattctcgctaagttctatgagtaatgtaaacatatctggcatttgtccccactttcttcctgggacctttaaaatgaaagtttagtgatttattcttaatcgcccacaagctgttaggtaccctgtggcttgtagccatcagaattaattgcaggtggctttgcgggtctgcagcatgcagtaaacatgatcatgatggattcctaacacaacctggctggcttagggtaattagctctggatcccttcttcttgttctgaagtatgtttaattctccgtggatttctgaagcaatattttgtctttcttgaaagaaaattgaagaaagtctgtgaaatagaaaaataattggactaaactctcaattttttggaaggggaaatgtgggggaaacggggagataagttaaaggctgaagcacttctgtgaaactgtttctctaaagcagaaaaagaagagtgaatttagtgatggtatatttaccctggaatttaagaggaataactctttctggtgttcagaagtccatacttactgatgtactgtaaaaccttgcccttctaagtgtggtcctgggaccagcaacgtcagcatcacctgggagctaattagagatggaaaatcttggccactccagacctgaatcagaatctgcattttaacctggaccaaggcgattggcattcttatcaacatttgagaaccattgatgtaatccatggttagaatatttgatttacttagagagcttatcattctgtctagaaggcatttatattccagttatgattgccagaaagtcccagaaagaagcaggtgcaatgctgttccctgggagaccaggctgtgagggcagcagccatgcctctctggtctttggattcccagcacctagctcagtgtatgaaatgttaaggtggatgaatggataggtgaatggatggatagatggatggagggatggatggatgaatgagtggatgaaaagcgtggtaaacccctgaaaaaacgaaagatgaagtgaatatttttaaaaaatcaattacaagcagattttttgtgttattccatagtataggctagcttaatatcacaatcacagtagattacatggcaggctaacaaagtcttattttgaaaattggacagttgtaggcctccaacagcctgtggagcgaggtttggtttgtggaagggtgttattccagcagagaagaataccttcccttccccgaactcatctgctgctgcattagtgccctctattgctatgttccttttttctagctaggccctatttccacagctggagtataaactttttttttctttcttttttttttttttttttttgagacagagtctcgctgtcgcccgggctggagtgcagtggcgcactctcagctcactgcaggctccgccccccaggttcacgccattctcctgcctcagcctcccgagtagctgggactacaggcgcccgccgcctcgcccggctagttttttgtatttttagtagagacggggtttcaccgtgttagccaggatgatctcgatctcctgacctcgtgatccgcccgcctcggcctcccaaagtgctgggattacaggcgtgggccaccgcgcccggccagctggagtataaaccttttaaaggcaggactctgcctgcaacattgactcccctgcccccagcacatgtccgctaacctaaaccaatggctttttaatttttgcatatttttaaatagtgcctgtcctttggtgccacagttgtatagccttaatgatacttctgcaaataatggggatccctttctttctaagatcccggtaatgctgctcatgccacattggctaatgctgagagcttatgacaacatgaagaaattcactccagggagtaacaatctgtgtcctcttttctcatccctaaatccaccatttcttttggaaataggaatgatgtctttttatttttttaattttttgtttaaacaattactggttctgttgtccaggctggagtactggggtgcaatcatggctcactgcagccttggcctccctgggctcaagtgattctcccacctcagcctcccaaatgtctttttatcattggctcattttattgcattcaatgaattgttggaaattagagccagccaaaaattgtataaatattgggctgtgtctgcttctctgacactagatgaagatggcatttgtgcctgtgtgtctgtggggtcctcaggaagctcttctccttgagaggccttgccagtgccagcctcatcagagggcagcttgggaggagacccccccgccatgcttatagcttgaatggattcctgagatgatgtttcatggtgcagaggcagaggaagggcgggatagtgagtggaagaagcattggccatgaaatcagaaaaccttgatttgaactgtaactctcctactcactacttgtgtgatcttggcaattttcatcatgtctgtgaaatacattgtacagtgcgtgacagggagtcagcattcaccatttgctagtttcccttgcctctctgagcctgtttcctcattatgatgcataaaaatatcacatactttagcacttgtcacataaaacgtgcataatgaatgcttttgattccctccccgtttgctggtcccgggtaccacccacactgtttggcactccctgtttctctgtgttggatcttcttaaagtgttctattggatgaccttcacttgtcccttgatgccatggtcagaaatcatggtctatctgccaagtggactttcttccatccagtagtttctgtccatccctgaccacccactagatcctccatttacccagcacatgtttcaagatccaggatctcccactactaagtaaaaaaacttgtgctatttgccactggaaactgacttgaaaacaccggaatccagaaggtttattcttggggcacttcctcttcaaattccagtacttttggcatttttgacacaaatacaaattttataaattatttctttaaaaataaagtatataggttcatcgtagaagaaaaattgacttaaatatagatagtaaaaaggaagaaaaagttcagttgtaatcctattatacacagagaacaattatttgtcaccttggtggatagccttttaatttttatatatgacccagcacagtggctcaggcctgtaatcttagcacttcgggagaccaaggtggtcagattgcttgagctcaggagttcaagaccagcctgagcaacacagtgaaaccctgtctttacaaaaaatacgaaaaatttatccaggcctgatggtttgtgcttgtagtcccagctacttggggggctgaggtggaaggatggcttgagcccaggaggtcaaggctgcagtgagcagagatcaggccactgcactccagcctgggtgacaaaatgagacctctttagaaaaaaaaactttatataaatgaatatataatatatgtaatacattttatacaaatatacaaataaatgcatataatataaaatgcattaacatctattatataagtatatgttaaaatatttttagtatataggtatgtatttgatccattggcctctaactattccatgttttcagaaacacacacacagtcttaatgttcttagagttttatggcttatattttttccacctgattatcccttgtgctactgaatataaattattgtttaaacaaatcaatgcctagaacattgcctagcctatagtagtgtacaatgaataaatattttgagaataaatgagaaaacatatcctaatgtaatttttgtgtaaattttgagctttcaatgttggattttcttttaaatggggtaaatctgttgataaattgttatgaaaagttcacatggaaaaaaagcctcatttaaagggagattaagatagatctttactaacatctgttggtgaacctgtctgtcataacttttcattttagaaccgcacagtgatttagcgttgaatcctatttggactaatttaagcctgcaaatctgaaaactatctttcctttaaaatttgagggctttaagtgcaatgtttttagggattggacaaacagttacaagagggacgagtagcctttgaattccctgccagtaggcacaaaccctgatgcccctaggggctggcaatgatttcacaggttaagtggcgcagatgggaacccactgcagtcactctgcaaaactggagtgcgatgcatgacggagagtcagcgttcacccagtgctagtttccaaaaggcagccactactgaactttcatgtggcaaggtggggtccaatggcaccagcttgttttctttcttcaggagaagtaaaaaacttgaaaaattatgtgaaattcttgattctgaaataatggcagctcatttaatttaaaatatgaaactatgcaagcaaaacaaaatccacctgagaacaatgagcctctgggttaagctgaggaactgtttaaattgcctaaaagaccccagttactcaaatgccaggtggaagactgcttcagaagactggctgggtctgccttcctcaagggtgcgacacgttgctctcatgagccagatctaggttctcagtggctcctgcaggaagtcgtaagtggatgcaagaagtcccaagctggcagtctgccaggtgattccagtaggtaatgtcagttcaaataggggagactgccaatacctgtgacctggcacagtgaattggcaagcagatcagaaagagatcttaatacattgtgaataagtcctgatttctagagagatctccaaggttgaattattaaaaccctcacatttacctcctcttggagctctgttggagttaaaagtctctactgaatcttaaaaaggacgcaaatgtcaaaaagagacaaatcccagccaagtgatgggaaatgtgatttcaggataatagcatctgctcattggtcattaaaatacattatttccaatgaatgcccttaactctgcaggatgggaacatagctttaatcagacaggttcccagatcagagtacatcaaaacacaagcagcagattctgtgctgcctgatcaacagaggaaagaaattcagaacattttcttttacatttaaaatgctttatgagggaaatgggtagttagtcatatttattattgagcatttataagaatacttgcttattgttttatttccttattatttattttgagctgagtttctggttattaagaaagggtcctctttcttaaagggtagatacctgattgtgcagctaaaaggagctaaaaggtgcatcagaactgaaacacctgcctagaggtaggaaagggatcagattttctctagggatacctactgatcagttctaagagacacaagttcctgaaggagttcatttttctggtggctttttctaacgctgctttggtcctgaaggagttgcagataatgaatagctaagagaagacggtggagtttaccgagcggatgaggggcaggctgtgaatttagtaggaaaagagaaatgggtctgtgaaaatctctaggaagatgagaacaaacttgtacttgaacatcaaaatagcaccctaatatcttattagcagcaagcatacttggtgcccaggtgttgatttccaaggccattatccaataaaaagaaccagggattcttggagacacgaatgattctagggctggagcaaaaaaatatacaagatgaacctagggcaccctgtagagccagaaaataagcaagttctaaaacaaaacaaaggccaaaacttacaatgatgagactatattcaaaggaacacaggagccaactgaaagagctcccaatggccaaagctggaacaatttgacaaataaaataaataaataagcatttggattatatctcaaaatacaaaataaatatccatgagtccatgttataaataaatgattgaataaataaatagtataaaagagacaaatctcccaagcagaaaaattccatattttgtggagatactctggcctcaaggagatggaatgtaactcccaattccttaattgaggctgtgtatagtaacttccttccaaagagtatagtctgggaagaagcaaaagagtaactttacagtggggaaaccttacaaacagtacctcaaccgggtgctcaagatcaccagcacagtgacaagtcatgttgatgctatgttatccttgatatgatgtgatgaaaatggcatctgtggaatctgtgactttctccccagaatccatgaccacagtctagtcatgagaaaaacatcagacaaatcccaataaagggacattctacaaaatatccgactggtactcccgaaattgactgttcaggtcactgaaagcaaggaaagcctgataaactgccacggccacgaggagtctaaggacacatccaatttccattcgcatccaaaatggaatccgagacagaaagaggaccttaggtgagaactaaagaaatgggaacaaaagtatggactgtagttattgacactgcatcaattttgtttctttagtgctaataagtataccgcaaaatgtaagatgttaataataggagaacctgggcacatggtacatgggaactctgtgctattttcacaatttttctgtaaatctaaactgttctgagacataaagttggtttttaaaagagccatcctggcctgcactaggaaatacttactcgatgcattgtggacccttcctccaattcaagatgtctcaagtagctttcttggttaaaagggcagtgatgtaaaaacaggcatcattttaccaaagggccaccagatggctgtcatctggcagaagtctacttcctgggctttctagatgcatacatgactatcaccgggagcattcaacctccaaagaagagttctactaattatgtctgtctaaataatgtgataaatttaagtttcaagtgatagcagttagttcacattgtaaatatacaactcagtttgtctgtaccaaatttaaaacaaatttgcctactgtgtcccaggaaatatttcagccaggtacctttgattttcacaattgggctatgtagaaattgcttttggagacaattaattggaagcacttataaggttgtagctttaattacatactgatgtagtctgctcctggttaaaaaggcaccccataggtcaggcttggtagcttacgcctgtaatcccggcactttgggaggctgagtcgagcagatcacctgagtttgggagtttgagaccagcctgaccaacatggagaaaatttgtctctactaaaaacacaaaattagctgagcatggtggcatatgtctgtaatcccagctactcgggaggctgaggcaggagaatcgcttgaacttgggaggcagagattgcggtgagcagagattgtgccattgcactccagcctgggcaacaagagcaaaattctgactcaaaaaaaaaaaaaaaaaagttatctgataagtagtagtgatacgttaaagaaaaaaatactactgttgaagttgctgttaattacatgttgggtactgcttacttcctatgtaaggtccaaattctttggatgatttgttcaaaagttggaacaagagatatgcagaggcactttataatcaccttttgccttctgaggtagtcatttgtacctacctcagctactcataatctccttcaaaactagggctaagtattgatggcctttgtgtttcccatgcaactgccaaagggccttgcatcaacacattttggtgaattagttaaacaaggtacacctctgctgttcctaggacttaactgaaggcttagactggaatcacagaatagtcagaatgtgccatcttgattactgcttcctttctacccacagacatcaatggtaaaatcagacacttttgttctctcagatttctgtattttaatgtactataaattacatatttgaatgcactgtattcatttttcatatcaatcactgaataattagaaggtatttcttcttaacaagtgtcaaaacatttcatagccccagtttactttgtagaatttcacattgtgagtaggtgagagccttaatcatcagagtcaaaccttaagtgctaaaatccgctctgtggtgacatttacttaattgctttacaagactgaggctcagtcaagtttgtcttcctcagcaactcttcctttttatctaattatgcatttagatggagtccctggtggtggggagggaggcgacaggggtattggccttaggcaaagtttctgttccaaaggagatttagtccgttattatgtctaaactttccaattcgtagtccattctagtttttaggaggattaatgtacatcctatctgcaatatagtaatattagccttatccatcattgaagagtgagctcaccacctagttctttcccgagctgcccctgtctccttctctaccccttccaccataatccatagcttcaaccaaaactttattcaagtggcttccaaatccagatctaaatctctgacctttattctaaacccaagatgcctgcttttccagactcacaaattttactttttgaggaaccatattattttttcctgacacttatcacgatgctttgcaggctataagaaagtaataaactgggcatggtggtatgtgcctataatcccagctattctgaggctgagcggggaggattgcttgagccctagaatgtgagtttagcctgggcaacatagtgagaccctgtctgaaaagaggaaaagaagaaggaagaaaggaaagaaggaaggaaggaaatgagcaaatgaagcattatccacaatagccaagatatgtaatcaacctaggtgtccatcaatggatgagaaaatgtgacatatatatatatatatatatatacacacatacatacatacatacataggaatattattcagcctttaaagagaagaaggaaatcctgtcactttcaatgacatggatgaacctggaagacattatgctaagtggtataagccaggcacagaaagccaaatacagcatgatctcacctctttgtagaatctaaaacagtcaaactcaactagtgggatagtggttatcaggggctagggcaaggctagggcagggtgatggtagggggagccagggagaggggttggaaaatgttcttcaaatgatacacaatttcagttagacaggaaacataaattcaggacatctgtacaacacggttactagaattagtaacaatgtattgtatacttgaaaattgctaagagaatagattttaaatgttctcatcacaaaacaaaataaatatgtgaggtaatagatatattaattagtttgatttagccattccccagtgtattcgtatatcaaaataccatgttgggacacaaagaagggaacaacagacaccgggacctacttgaaggtcgagagagggaggagggtgaggttggaaaaactaccttttgggtactaggcttactacctaggtgacaaaataatttgtacaccaaacccctgtgacacacaacttacctatataacaaacctgcatgtgtgtacccctgaactaaaataaaagttaaaaaaaaaagacaattggtaaggaaagtatgattattatttgaagttttcatgaagataccgaaagatacaaagatgattttttgttaataatttgtttacaattgtatagttgtcttttattctcaataaattattgaattccttaaaaaaatgttgtaaaccattaatatatacaattttcattttttaataaatacctttttaaaaattaaatgaggccgggcacgatggctcacacctgtaatcctagcactttggaaggctaaggtggcagatcacctgaggtcaggagtttgagaccagcctggccaacatggcgaaaccctgtctctactaaaaatacaaaaattagccaggcatggtggtgcaagcctgtaatcctagctactcaggaggctgaggcaggagaatcacttgaacctgggaggtggaggttgcagtgagccgagattgcaccactgcactccagcccaggcggcagagcaagactgtctcaaaaaaaaaacaaaaaacaaaaaacaaaactaaatgagcaaatgaataactgagtatataatatggaaaacaaaagccaactctcttaggagctaaaaattttagccattttaaatgagaagtctccaaaaatgtcataatatagtataattatataattacatgcctttcccaataaaatctactaaatataatttaatcttttttctttttacttagagaccacccttatgaatatcagttactatataacatgtggtaacatagtagcccttaggtgttttaactatttgagaaaatttgccctcctctaaaggagtttttttgtctgcttttcatattcttcactgtcaggatgccacctgtcatttcttgctatcactggtgtctgtacctccagcatcagccccacccttgttccctgattgtaccactctttgccaaattttatgacttaactgctatgagttaggaaaccctatagctttgcttttagacatttctaaacaaaaagtaagctctaagcaaggccttgaggagctactttatgagtacagtgtgtggattggtttcagtccattttatccacactgaaacattttgttgccacatttcttagtttaactgtcctagataaatgaagttgctaggtgagagaaagttgcatatcaacataccccggcaaataggccttcatttgatttggtacctattctctgattctagagaatatactaactctcactcagaaaagaaataagatctgtaaatgtaaattcaattggaaaatgttatttattccatccatctccctatttaaaggtcataatttttgccttcttctgcaagacttcaaccatcattgttttcagtgtttctcaaagtgtggtccttagaccagctgcatcagaaacactcagagtgcacgttaacaagcagattctttggtcctacccttggtcaatccaatcagaatcctccggtggtgatggtatattccacgttacttttttttttttttttttttttaagcaagccttccttgtgataaattctcaggcatatgagagtttacatcaccaagctagaatgactcctctgacattcttcacaattcccttccaccaacccttcctcctatctctatgctttcttttccagtttcatacattctgcttatccactatttcttgaatttttctcttctccagacctccaaattcagaaccttcctttgaatattttatgaccatccatctttccctaatcaagaacaaataaggtaatcattttttcctgaacataaaatttctgcaatatgcctatccccttccctgagcctgcaagattgatagatgggttatacaaagtggtggaaacactttttctggaagtttttcagaagtgagtataagcacagtcatgttcataggtagaaagagaactggatgacttataaagccatttccaggcgtgcctagagtctttacattgtaaatactaacttaatttattaattttctgtccattcctttttaagacatttctgctagtcttttgtctttatattttgaagcttttctatcctgggactatactttataatcatgttgtatctcttataatagtagacactagcaatctgcaatacatttatggacatggaataaatccatattgatctatactttgcattcttgttttctgtatcacaattgaggtgtgagaaggcagagtctcacctaatacaatgaaataaacatcacccaacacagaattgaattaagttttatccttatttaaattttctctgatgaaaaattcgtaaaataaaaggttttatatcagtgtcatatatttatgtaccaaattacaccctgaatggagtagtaatagtaatattcatgtaggccggcaacagtgtttcagaagctgcatgggagacagacaggcttggtataacagccaagtgggcaggtgatctctgttgacatcccactcctttgcattgatcctactttgtttgtctgttttttgagaccaagtttcgctcttgttgcccaggctggtgtgcaataccatgatctcagttcactgcaatctctgcctcctgggttcgagtgattctcttgcctcagcctcccaagtagctgggattacaggcatgtgccaccatacccggctaatttttgtattttagtagagacagggtttcaccatgttgatcagtctggtctcaaactcctgacctcaggtgatccacctgcctcagactcccaaagtgctgggattacaggcgtgagtcaccgcacctggctgatctcactttttttagttacccagagtcctctcaaaggtgcccttcctacatcctaccatgacctgttcacccacaaatttctccaaactccaaaattactcttggtctctctttaataaaagttttggtagtagggagaaagtaatctgatgtttgcattttatttaaaaagtttattgaataaaattaatgttggattattgacatctatgtggtccacattcttaagcccctcttcctgctgtcagaagactatgagttagtaacttgccatcccacttgaaaacatcttggtttggggaagacagagctaaattgtgggtacagaatatttgccctttgaatctaggtaacttaagatgaagtctttctgtaggaggcagttacaccagctgcctttcaaggatgaatcaggattcagatgaattcagcctcacatgatttctttatatcaatgacaacattgatttctcagactatcaatatggtctttctcttgtggcctctaaccctaaccctgtaacaaagaaggcatttttaatcactgagggctaaaatatagaattgaatgaaggcaagcaattccatttggaatgtcccatcagcattggaagggacctcctttgtactgcagcctgctgtggctaagcactaagaatgtattgtgaactaccagtgctcagggagcagccggggaagtatcttctctagacaacagaggctgaagctgtgaatcacgcatttaagtaacagagttgtaggcaaatagcaatagacttgtaagcaaagattatattgaatttgacaacaggcttgggtgttttgtttatttatttatttattttgatgacttcaacctgacattgacctgatgagctcagaaaaatagtcttgagctgaagagcactcacttcccagcagagatttccatgttaatggatatgtcaaccttattcagtgaaaaagaaggtcaagggcatccaaataatacatataatcctttcaggctattttaattgagtttttcagtatcatagttcactaagaagaaaaaggggagaaatcatcacaaattcattttgattgttatcccaaatgaaaaaaatatatatttagtttatctttgctagaaaatctgatcttgtagaacaatcctggtgttaaaccattttctaaaactacatttccagaattagccaattcagcttctttttctattctgtagaatttggccagaatcaaagattcccaccgtggcttttttatctgccttttagggcccaagtccggcatcaattgctccttcaactccaagacgagttgagcgatgagtatttgaggaagagcactgcaaagtaaatttccatctttcacccccacatttctatcccgcccatccctgcatctgcaggctctatgatcaaaaataaatatcttgctttcttaatcagaatttaggtatcaaccaaagattgcctgcatccagggactaatgggagtaggccacaggagattagatctagatcttacccaggttgacaatctctatctaggaggtcatgcatggtagcatttatcaggaagcagaagatagcatgcatattgctcaggccacatggcaccctgcgatcttcaagctggcccaggtatatatactgtggagacacagttttgtaaaaactctgatgccaaagtagttcagaatgagtacgagtgggaagtcaaccatgcgtggggactgcatgagccccctgaagtgttagtctagataaagcttctccagtttatttcttggcaaagagcattccctcactccaacccaagggcaatttctatacagtggctaaatatctaaacaggttatcataatgggttgggagaatatattaccaagaagatttgagtcagtacagctttcttcctgcataagacttgataacctgaattaaattaaacatgatgggttgattaagaaacacaatttgcatggtagtaattattaatggctccagctactattgctgcacaggaaaccaccccaaaacttagtggcacaaaatagacatttatgatactcttggatatagaattctctgctggtcaagaattcagacgggacatagtaaggatagtttgtctctttgcacaacgtctgggacctcagctagggagactcatgacctgggggtgatttgatgactcagggctgaagtgattttgaggtttctttctgccatgtctggcagttgatgttgactgtaggcagagagcacagtaggctgctgaccgatgtgtagcatcgccagcatggcagcctcagaagagccagacttcttccacggtgactagctcctcccagagtgagtatcccaggagaaccaggaggaagctttatggtcttttctgacctagcctcatacagcatcatttccatagtaaaagaattatcgcttacaagtccagattcaaggggcagagtgaaagaccccatctctcaatgtatcagagaatttttatataagatttaaatgttttcaaattgcctcattcatataaggcatagccatcaagagctagagccatggtagaaaaaagctactgtggccgggcgtggtggctcatgcttgtaatcccagcactttgggaggctgaagagggtggatcacttgaagtcaggagttcgagaccatcctggccaacatggcaaaaccccatctctactaaaaatccaaaaattaactgggcatggtggtgggtgcctgtaatcccagctactctggaggctgaggcatgagaatcacttgaacctgggtggcagaggttgtagtgagctgagatcatgccactgcactccagcctaggcaatagagcgagattcagtctcaaaaaaaaagaatgaagaaaaaagcttctgtggttgcaatacaactttgatgtaatgcatagctcagtaacaactcagaagtgaagaaagtatacagaaggtctatgattatactaatggctatgaaaaatgcttaatataatcaagcttggaaagtccatttttattcactgatagtaaggtttctaactgtacacttagagatatttagaaacaattttattttcagaattcccacaagattaataactttgcgatcgcaagtcataaactttcaagttctaaccacttttacctcttgaaaacaattgttttattaccatttctaaagtttttattacggaaaatttctttctgggtatgcagctaggtactgatttcatttattacagctctggtcactatttatcctactccttgttcaatattacttcacacccccacagattggcccgatttcctccacgagcctcccttggtcatgttcaagtttcacactgcatttgattgagcctctctttacacagtacttatatttgtcgttacttttgaacatgtaaattcctaagcttggagagtcttctcattaggaccagggaaaatgcattcgtgttgctgtctttgatctctgaggcggtatgtgatttaagtttgcctcagatcctcagtttcctgtctacaataatgaatttgggcagaacctgtatgatctagttttagaccaaaatctcttttttaaaagttttaaatgagatgaaaaagaaattggcctctttgagaagagaggaagtaaaaatggagcgacctgaagggacccagggagattaagcggcctccattttgagcaggcagctccggggtctgagagagctgaccaagggtggctttgacagagagagattatggacagcagcagctcagaataataggtggtttaaaggatataattaacaatcctcttctgaaaagcagcacaacagccttagaaagagaggtcaagggctcttttggaaaggcctcggggcaacaacctcttctaagcaaatgtttaaataagcagttctcctaacagttaaagggtgacttcacttacatgtaggagctcgcatttgctaaaaatcaggtaccatgtcactcacagaaagtttatcaacatgtgggatattttcctaattaaaaatataggaaaagaaatgtgtgtgcattttctatgtgtatatatttaaagagaatcaaaaacacagggaagtgatttttcacgacagtaataatggcagacctgttcatgatgtttaacttgccacggtctgttgtccagcttgcattcatttctgtttataaaacccataaaagtcttgagcgaaaacttccttggaaaagtttttataattcaaaaaagtcatcaactcaaaacccagaccgggtttggctccttggatggcactgcctcagggcctcctccctttgttcttctgtgtacacagagagaggaggtggagccaaggaagatgaaagttcttgacactaatgcctggcaggacaagtctggcaactttcagaacaatgcaaattgaatggccaaattagacaatttttcccaaactgaaatgacttcttcacagaaacttgtaacacttggcttacacgtgccgaatactagtgtaacccacttgggggcagctgtagttgagctctattaagcttcaaggtgctgctagaacaatactggattagcccactggattcaaataccaagaactgatggtatgaggtgaggcatgctcttctaggcttcttgcccaaaggtagtttgggtttgtttttaaatatttgaaaagaaacaacccttttcactttcagtcttgagaaatagacggaggtttttgatgggggtgatggtgatggtggtggtgctggtggtggcggtggtagttgtgggtcgtccttgttttgtttaaatgaatcaccaagagctagacaatgccacggtaaatatgggctctgaagatctagcccaaccacctccattaactatgaaggaaatggggcctcagggaacagcagcagttctagaggtggcgaggccttagatggaagtcatgaattggggcacattgtgttgttatgttccctcatttgaggaacaaaaaccaggaaagtttaatggatctctccaagttcacagagctgtttattaaaaaagtcaagacagtggccgggcacggtggctcacgcctgtaatcccagcactttgggaggccgaggcgggcagatcatgaggtcaggagattgagaccatcctggctaacatggtgaaaccccgtctctactaaaaatacaaaaaaattagccgggtgtggtggcgggcgcctgtagtcccagctactcaggaggctgaggcaggagaatggcatgaacccaggaggtggagcttgcagtgagccgagatcatgccagtgaactctagcctgggcgacagagggagactctgtctcaagacaaagcccactgggctaaagaaatgtatgcatttaggatagtcaaatgaacaaaggaatgaccattccagtaccagcatgaaaagtcattccaaatcgaacacacgcagcttgcattgaccagccacttggatgtgacacatacatttcctcagagcaaacagtaaagaatcgattgtccagagtaaagacccatacagatgtgtctggctttatagaatacacagtgctacttttcaggtagatttgaccatattttaaatatatatgaacaactttgcttttaaaaattctttgtaaaatagggacattttctgaaaaatagaataagcaacctcaatttatccactttccaatctgaattttcccacgtaatatttgtttcacctgggtctttttaaattcaatgaactgaaagagttaatgaagctccagccttcctacacagtagccaggcaatccaccatcctcgaatatgcattttgagtcattatacccaatgtatccggttggtgcgaaataattgcagttttgccattactttttaccgcaattacttttgcaccaacccaatactttcaaaaccaaaagttaaactatttgtatgtgttgtccatgatagtttcctctctagactaagaacaaagttttgtaaagtatccttctgtgtataagttgttttaccttgcagaagttggactgagagggcaggatcgcttgttttcacagaattggttgaggttgagcatttgtcacaggccccctatgcaggaggctctgttaatgcacagcaggcattgaaaactcaaatgcccacaagagccagacagctgctacagatgagcaaagcagcaggttaagtgggagaagcaacaggaagtggtatgggaggtggggaaggagtagttagtgccccatctgaagggatgggtgctactcagctccggttcatgcagaaacataggccagttaccatgcagaaacgtaggccaggttttgacagactcgtcattttttaaaagaaaaaatgtattttaatgtaaaatcttccaagttgttaatgttggcaactaactcaaatttgttttgaaacgagtgaaggtcaaattaaaaagtcccttgaccctctggttaccagtatgagacttctagatgctaccatgactacccatctgtttttggttttgttttcttttagggacaaggtttcactctgtcacccagactggagtacagtggaggcatcatagctcactgcaacctccaactcctgggctccagtcatcctcctgccacagtctccttagtagctaggactatagccatgtgccaacatgcctggctaatcgttttgtagagacagtatcttgctatgttgcccaggctgatctcaaactccaggcctcaagcaatcctcctgtcttggcctcccaaagtggtaggattacagatatgagccactatgccccgtcccacccatctttttgtagaaatcatatgcatcctttatttgccttaatcacatccttcttaaagctatcctcaacactctgacatagtacatctgtaaggtctgtactgcacagttaatgcttaactctctcctttctttgtttctgattatttcatatgtacagattttgtattcagacttgatcataagcacttccagaacaagactcatatctaatacttcttttatagctatctcaaagctcaataaatgtttgcagttggtatttttcttaataaagggaaaagaaaatagtctttgctgacacacaaatacgtagttatactaggaatgagtttcgtgtctcgaagttcctgaatttctagcctaggcaagctaacaagttaacatctgtaggcatcttgccttgacgagctgagaagcactggcttgccataaatgtttaagaagaaagcacttggcaaaatagctatgagttcatttatgtcttttctagaataaaaatatcataggctatatttagtcccatggaggtgatgttgttccttacaagccttgactgtgaatgagaaattttctgagccaattcttgtctgcaggaaaccttccattgatttaggcattagaagaatgataggtccagctaaagaatgtcaagctcctgttttgcattcacaagtcagaactctctgggccttcttcttacagtgttttggaggagtacagcgtgagctgtaagcagccttaatccagaaacaggtgtaatgggaggagaaatggagcaagcattgaagttcaagaaatgagtgaccactatctttgtccctatgtggaagtgaggagaggtgactaagaaatggcgaacactgcaagaaactttttgccttgtactggcctgttaaagttatctctctgtggccaacagtaggccaaaaatccagaacagctgggcatgtgtgccaggctgcccaaggatggttctgggagtggtttgaattgtccagcaccatttgtgagtgaaggagaagtatggaaacaatgacctctacagatcactaaatccaatgggcttgatatgatagggaatcaagaggctgtggtgaagggaccagctctggtatgaattgattgcctgaccaaaggaaaacattgtatttcttcccttacctggaaatgctaataaaatatccagaaaggcttttactttttttttttttttttgagatggagttttgcccctgttgcccaaactgtagtgcaatggcgcagtctcggctcactgcaacttctgcctcccgggttcaagcagttctcctgcctcagcctcctgagtagctgggatgacaagcaggtgccaccacgcctggctaatttttgtatttttggtagagacaggttttcaccacgttggccaggctggtctcgaactcctgacctcaggtgatcccccgacctctgccacccaaaatgctgggattacaggcgtgagccactgtgcccagccagaaaggcttttactgaagaagccctgtcttcatactagccctcacaaacgctacacagacgtgcctctcagacatttctgtatggttctcagagtttcccaaattgtttggtaatcagaaaaagaaataaattgtcaaataaacagacaacagccttgcattaggaagcagactttggaatgccaaaaaaagaaacggtaaccaaaatagtttggttactaaaaatagtgccttaacttaggcaaacaataccagggtcagaataaacactaattaacattgtttagaatactttattgtaactctgacattattgtcactttctatttaataatagaattttcttttctttctttctttcttttttttttttttttttctgaatctcactctgtcgcccaggctggcgtgcagtggtgtgaacacagctcattgcagacttgacctcccgagctcaggtgatccttccacctcagccttcctggtagctgggactacaggcatgccaccctgctcagctaatttttgtattttttgtggagacagggttttgccatgttgcccaggctactctcaaactcctaggctcaagtgatgtgcccatgtcagcctcccaaagagctgagattacaggcttgaggcatcatgcccggccagaattttctttcttctttttcttttttttttttgagaccgtctggctctgtcgcccaggctggagtgcagtggcgcgatctcggctcactgcaagctccacctcctgggttcacgccattctcctgcctcagcctcccgagtagctgggactacaggtgtgcgccaccacactcggctaattttatgtatttttagtagagacggggtttcaccatgttagccaggatggtctcgatctcctgacctcgtgatctgcccaccttggcctcccaaagtgctgggattacagacgtgagccactgcgcccggcccatgagccaccgtgcccggcggagaattttctttttaacttgtcacattgttagtccaattgcattttcttcatctgcaaatttgttcaagttgctaataaaaatggtggagaaaataaaattgatgtatctttggaatggtggtgtttaatctgtctaaaagtaatgctaattataaaaatagagacatttatatttcttttcttgattgttccttatttttctctcaacagccttcatatctgtttttttcttatgaagcttcttctggttggaaacttgtcaaatttcatcaggtaagaagtgctaaagtgaacctgtaaactttgtttcaaaaaacaaaaaccgaagtttaagaaatctaaagatggtgtcagccttagacagatctctggactgtaatctgggaaaggtcaaataagatctccaatcgtgtacaattccaaatacatttgagagcagtgggtctgaaaatgtggttcccagaccagcagcatcaacaccatgaaggaagttgttaaaaatgcaaattctcaggctctcccctgtgctttaataaagtttccagttgactctgatgcacatacagttctgagaaccagttttagataggtttcgtaggccaaaggaatagaaaatatctctctgggtcgattgcatttaatggacttaatgtttcttcctttcttttctccattgccttttcttccttcagattcatccattcctcatttaacaagcttgcttcataaaatcatacattattccaaacatactatctttgtgacaacttaaattctatctaatatgggactccgtcaaaacgatgtgtttggtagaaattgtcaactaatgaaatgatttatatcccttgttagctttgaggaggaaaatagtcatggaagacacatctataaatgggtgtccagctactaagatggctgccttttataattaacataattaacatccacagcatggctgggcatggtggctcatgactaaccccagcactttgggaggctgaggcaagaggattgcttgaggccaagagtttgggactagcctgaacaacatcgtgagacttcatctctataaaaaacagaaaataaaaattagccaggcctggtggcacacacctgtagtcccagctacttgggatgctgaggcaggaggatcacttgagctgaggagttcgatgctgcagtgtgcctctgaagccattggcaaaggattgtgtcgtcctttatgaaggatttatgttgtcacacaaaatgtgattctgtcctcttgtagtgtttagggtatgctggagttctccacactatccagtatcaccaattctgaaaaacagcctggatagctacccagcagaaatttcatctctgatctggtgtaaccctgggaatccctgttaattaattatctgctaaacttaaaaagaatacatataaagatactgtcgttcttaaatgattggtaaatgtggctcccaagagtacctttgctgaagatgatgcctcatttgcaaagatatgcatgatttcttctccaaatcatacatatttcttgacgagtaggtatcagagtctcttagactcaatttcctcatttatataatgaagatactaatagactgtactagtgaggattgctctaaaaaaataatgcagataatccaggagtacttagcaaatacctggcttaataaatattagccatgattaaagattttattaatagacttataaattcaaaaaggttacatcaaactttgtctcattaaaaacaagcagacaggggagatatcaagtgtctctcctttgcatggctcacctacctgtaagttttctcatccccactagaccagcagcaacaccactactatgttttatcttctatgaaggtttgttattatgtcacctccctgttctctgctcttctagttccttggccactgctggcactccagcataaggccagatagcattagggacgtgataaaatatggaaaagcatcattcatagcctatccatagtgctaggagagtaaagaatagtgcctgctattagctcctctaatgttcaccagcccttggagcaaaatttgaaaagccagctgggtgaccccagtgcagaagatcaaaggaccagaagaggatcttgaaagatgatttatttcccttacctctattcaatgtacaaagcaaaacacgtcatcagttggcaaatatttcaggagaaggaactttccctaatctttcacataaatgctaatatgaatgaataacagttatatatgattagaaaatctcattttagcataagttgaaatatttcatagcatatgctggaaaggtacagttgcatctatgacatattgccctgtagatggctttggtgagagaagggagacagagagaaaggggattcttagaggagaggtatgtaaaacattaggattaaacaagtgtccaataaacaagagatttctgagtttgaattagtgatgtagaaaaatgagagacatctggaatctatacttcttttgcagtcagaaacacagttttgagttcctttgttgaatcatttactttataaagacttattaaaaacgaatgcctaagatggttgaaaagggagcaaaattgaattcggaaggccaaatcctttaagggaatcatttcaaagagcttttactttccatcaactaagcttaatgttgtctcctcaaactagtccttttgttctatttcaatacatatgtgaagagtcagaggcttatagactcacttgaaatttaacagtaaatttttggagacagagagaagactaattttcttcacattcttaggttttatcatatgatgctttcatagacaacactttcctcaccctacccccacacacaaaaatcatctgagagaaggggatctatctagacattggttcttcagacacagctgagatatagaaatgaggttgttttctttgttgattttggggaagactcagctgcccttgatagtcctgtgacaggcttctagccaagatagactatggaggataaaggggggttatgcatcacttaaaccccactttgtcctcagtcagtgctttcaaatgcccttgctgggtcccataactagccacttactggaaggaaagcaggggttataggccaataaggtgacctggcgttggaattctgaggagaccactgacatttcaatgccccactggccctgttatcacctcttatgccaatgagagacaaaggagcaggagagagagaggggaggaaagaagggtgaaaagggacagaggaaatgtcttaaggtgaaacagatattccaggaatacactcctccctcatccatttgctactttccttcagtactttacaagaaagtaaatattgtgaggagccagatcccagggaaggcacagaaaggaatcctacattaggctgaagcagtatttttggtgctctgctggcatactgaattcttaggatgctactgtggagccaacatcacgctggtcgtttgtattcaagttatggtgatgaagacagtccccgtgtctcaaatctctatgtccaagttattaaattcaggagactggacgcttaccttaaatgaagcaaggtaggaggcagatgactacttaccaagaccatcatttgcataaaggagtcaaagaatcaccgtgtatcagtcagaccacaggctggttgtctctctaaccaagtaacctgatgctattaatacaatgacaactagggatatttagggaaagaaacgagacaagattgctttctaggaggcatttccagaatcccataataattagttattactaaattcatcaccctcttcaacctatttttttattttctatgaagcatctcttgggtaacagttttcatagaattgctagccacagggtgacttcatgcttccttttatttgtgctaaagccacctttgattaacccttgggaaggtcttcctgtgcttgccctgccagccctgcccagcccttatggttttgtaaacatcaatcctctctgaccttagccaccaccttttcagagtgaagggtgcaataggctctccctctcattgctcaacctttctagtctcttctggttgtgccctggaatttactggaccatggttttccaagcatagatcagggcacatgcaaaaatagactctatccacagagcctttaaagctaccctgataagaagtcttcttttttgagatttatattcattttgaattattaaaatacaagtgtccatcatgagacaaatggataaagaaaatgtggtatgtatgcacaacggagtactactgagccataaaagagaatgagatcctgttatttgcaacaacatggacagaacctgaggacattatgttacataaaacaagccaggcacaggaagacaaacttcacatgtcctcactcatttatgggagctaaaaattaaaacaattgaactcatgggtatagagagtagaatgatggttaccagaggttgggaagggtagtgggtggggtgggggaagtgggaatggttaatgggtacaaaaatatagttagatagaatgaataagagctaatatttgatagtacaacagggcgattctgatcaacagtgatttattgtatactttaaaataactaaaagaatataattggatggtttgtaacacaaagaaagtataaatgcttgaggtgatgaatgccccatttaccctggtgtgattactacacattgcatgcctgtatcaaaatatcttatgtgccctataaatatatacacatagtatgtacccataaaaattaaaaataaaataaatttttaaaaggataataaagaaatacaaagtaaatgtgttgctctcatgtaagagcagtttggccttttttatcacagcatggagcctattgaaagaccacttttatgcctagagagatgatgccccaccagtcactcaaaatggctactaggaacattatcaatcctctttcattgctgagaatggcttaaatttgaattttaagattcaatttgttatttaattttaaaatatggcttacattttaactttaagatccagaggcagtctgaattaaaaactggggagaaaggaattaaggcagataagtaattccaacttatctatcgacatgaaataacctttacaaagatgggctgtgaatataaagagagccttgtctgtgctccctgaacatcaggactttggatcttgcatcagcggagggggccacctggctctgactttctcctgcagatgcagatgctccttggttgagctaagtggaaattcccttctggagtctccctaggtaagggccgttagaaagtgtcagaggagtgtgtgtgactgttttctgttttcgtgagatattgtagaactttaagtctgctggtcataaatgttttctttttgaaatccttagagattttttttcttcttcgtcacaatggcaggaatacagagatttcgcatgatttcttaatgggattcagctgcctacgctgcagtgctttcagctgtatttgagaatgcactgtgtttctgccttgttttacgtttgcagatggctggaactctccgtgtctccttttctttctgtcatggctggcaagagctcatgggccatgagctgcatctttataaacatgaacagattagcaggtattcccaaatgggacaaatgctaccttattgcagacagtttctagtatagtcccacattctttgagaaagtaggtggagaccccatcagcaccaggccactggcagcaaatggttgtagccaggagccagaatagagcaagtccagcctgagcctgtggtcggcagtggagaagagagggtcgcagacctgaggcaaagggcagcctgaacaatcaagaaccagagcagccctggcacccgacacccaggagagtgggctacaggaagaggatctgagaccagagcccacagagtctgcagaaactagaggcacaaggcacgaggaatcacaaagcaaacttaagtgccgacatcaaagaaggcattctcaccctgtttcctgcttctgggtttctccacattcctatagccttacagacagtaagcccagtgtggtgggaacagggaattgaagtggaaagcacaggccaggggatctgatgggtctcttagatcccctgggagggcatgacaacatagagaaagaagagtcctttaaaagcattcaacataacgtagtttgcccaggcagttcacgctgactgaaacctcctctgtcttctgaactcgggcatgcctatctcatctcttcttttgaagcagaatgctttaaatttttatttttatcctgtgaacttcaatatgcgacctccttctgtgacagagcttctcttttggtcccccatgagtggatatcaccttgtactcccctgcacccctaagctcacgttcttcatcttctctttgaccctcagcatgttatcccttgacccattcttcagttttcatgtctatcatctgcaaaatcttttctgcctcatagtacttaggagatcagacatacgcacgctggagacaggaacctcccaatatcaaattagccacttgggccatcttgtctggcacgttgcataaatgttgtatggaagacaggtcctcctcccaatttcgtttttcactggccacatgatgttagacaagtctctttctctctttgagcctctcctgtctgatccaatgggttgtaagaatcagatgaaataacagaggggagaggattacacattttaaagcactatgcaaatgtaaggtgttgttataataaaatatggatcatggcttatgttggggtggggctaagcctcctttagtcattctttcagcttgtttgtgtaacctctggtgaaattttaataactgttgcaaggcataggtttcagcacgttctttgtttcttctgttggtatttgcaaggcagtcacatctgccatgagctagtccttctcagaagggagtgggtgggaaaacatgtagctaaaaagggcttaggagccctgagacatcttaaataggagtcatttaactactccaatggaaaaaaaaaaagaacagcaaaaatatcaccaaactcatggcacagtcagtagctcagcactatggttcttaccatttgaaatttccattcaaccgtgtttcatctccagccactatcatcatcatgatcatcaaatttagctgaattactagttcagttaagactcaatgtatagtgttgtgtatcagatatgtgccaagccctatgctaagtatacagccttgagtaattcacagattcttccatacgaaactcgcgtacaaataaacacacacataaaaataaacaacgtcaatttgataattgctatagatctggataattggtacatttaaagtactatgacagtacctaggatggagtaactaactctgcatggaaagtaggagaggaggtaacatgtgacctggcccttcaaggatgaacagaagttggtcagaaagtgagtatagagctatactcactgtgtatataggctttggggccagccacctagttcaaatcctagctctgccatttcttttctcttttttttgtactttaagttctgggatacatgtgcagaacgtgcagttttgttacataggtatacacgtgcctttgctatttcttaactacataacttggctagttccttgatctttcgttgcctcaatttgttcatctctacaacaggcattataccaatagggcctactcacaggttatcatgagcagaaatgagttcaggcacgtaaaacactcctaatagctcctgtcctatggttaatcactcaataagcagaagccatcgttgctgttattattgttctttgccaagtcaacaagcaggaaggaaattcctggaacttttagagacctggtctctgaatttaagagactgataatagcatcattatcattatgaataacaggaaagctaccgttgatgccaggcactagattcttgacatatgtgatttcacttggttatcatagtaatcctgagtgtcaaaaaacttccactgaaatataaataatgccacaaagaatataaagtaagtgaaaaataagtggcacaaagtggccactggaagaaatagaattacataagaagaaatatttaccatctaagtaatgaggcaaaagtcaaaaggattccaaagtggtgggtttaaaccaaaagaggtcggaggcatttttgtttgtgtattttcatttttgtttctgtgcatgttcattgcctctaagcagagcatgcccttgcttattcgctctggttctcaccactcgtgtgatacccagccctgaaaacacttgagtattgaagtttgtgacatgcagacaaggatctagaacttgagttttgcaaatgcttgcatttgttgaatgatgttttttgtgccaggcactatgctgtgtactttcagacacatgatctgtgtaacatcctgaataagatattatgatccccaatttatagacgaggaaactgaggctggaagagggcaagactagaaagaaaaacaagatcagaggcaccaaagcagggaggtacatatcatgttctgcaatccatttgaccagagaagaggacccatgcatggggaatagtacgagtttgggtggaagaagttaaatgaccttgaaggccaggcttaggaatatgaatgtggctatgggaaggtaataaatgataggtttccttttcttctttacagctttatgaaaacccaaccacagcaaacatacaggctggcacaaggtttgctctaaagaggaagagatctaggtggggctgaagatgtatcacttccctttggagagtgccctgccacaggcagggacaatctttcatctctcatagaggaaaacataagggaggaggcgccttccagtaaatatcctcagttgagttttcatattatatataatatattcaaggagacaaccacccaatttccctccctggattccaagccttgagatataactaatatttaagttttgcattgcagagtgccctgataataaagaacaaattccttaacctttgatcctaagatggtttttataatattgctcctgtttacctctctatcctcacctcactttactcccacagtataccccagctgtgctgatcccatggctgttcctgaaagcaacaaattttctccaagaaaatttatcaaatcacttgacaccccctcatatccataatgccttgcacttacttctaggatataacttctcaccaataatgtgtttatttgtttactttagatgatagctccatgaaggtagggattctgtcttgttctttgttgaataccctgcatttaacacatcccagcacatagtcaatgcttaagaacaatttgtcaaatgaatgagtaaatgatttggtgagagaagaggtgctatgattctctggtccttactcattgttgaatcctgcttttcaacttgccagtgtattcctcctctctcactgttcacctgaccctagacccctctccctttgcaacttgatcattgatttccaggtcctcttcaaatctgacatattctctgccccatttacaatctgacacatgtacacactcaccaccactaaaagcaacaataaaactgtctcttctctccttctggggctcatcctttaccaaaaaccactgttatctgccagagctccactgttacccatgaaacgttctggggactcacatatcccccatttccctctcaaacccaacaatgatgtttgaatggactagactggagaaagagacagggaggaaagccctaacagcatcctgattttgtagcattgttgttagaagtttctgaagtaaaagggaagttgtgtgcaccgtgtgtgtgtgtgtgtgtgtgtatgtttgtgatctgtcaacccataggtggggattatctggctacctctcgtggaatgaacaacctgggaggaatgtggacacctgccctgctcattggaaatggacaggctctggatgggcagtcccagctataggggcacaggaggaattctgcccagcaggctcaacctggaagtccagtatcagcaataataatttagtagcagaattgcaaacacctatgagcactccctatgtcactgtgctaagtgctttacatagattatctcaattatttcttatattaaccctatagggtaggagctcttattattcctattttacaactaaggaaaatgaggcacagagaagttaaatagtttgcacaagatcacacattaagtgatggagccagaatttgaacccaagaactgcaacatcagaatcctacccaatatagaatggttgaaaataggtaccctttgatttttgagagttagaatgtggaagcatcgtaaaaaagcaacacaatgttttctgtaatataaccctcacagactgaggaaaatgaaagaatcagggggtcttcaggactatataatgggtaaagaggaaagatagttaaaagtatttctcaacgtgttgcacttccagcaatttatcaatttgtaaatgtatttcattacaaatatagggagaatgagggagcacagcactgtcatgcactgtactggatctgtaactgttcctgggaattgtgcagtgcacagcctgctcatctttacatggtagcccaaaaatgcaggcttctttatatccctaaattaatataggaaccaaacgaagacctattactagagcttgagctagtgtggccttcaaaaattaaataaaacagaaaagatgtggaaatgatagactggctgccacagtaccatagaaagcagatatataaaccaatgtggccccagagtctttctgcagcctcctctgccaccatgcctttccattcaactacactaatatcatgtaacctgcccccattcccctaacatgcatccgcccacacttcccacactgtacaaatgcttctctctcatcctcagtctctcccccatctttctttatctactacctcctctccttcaggacctagacattcatccatggctcattcatacattcattcaacaaacatttctggagcgcttgaggtagattcagaagtgaccaagatgagtaaggcaattccccactctcaagtttctaacaatctaaagggaaaattaaacaaagtgagtcatctccaagaagttttataatcattctcctctttcttcccaagctagaagaaattcttatcttttggaggcatttacagtgcatatccttatcagtcaagtaccaattcaaaagacttaaagcaaaacaaacacatggtggagaaacatagaaaatattttgaaagctataaatcactaagtttatatgtctttatctatccttggttcattttgtgaagaggcaataaaatgctaagttaaagctcagttgattttctccagatacttgccgaattcttggcatcacattctaccatgtttccaggattcagagtgtctaagcagtgctagtgaaaagttcagttgagcaaaagaactttatgtttcattctaacctggaaatgctttccctacccgcattaaatgtatgaagcttgaatcagacagctatacatagagtgaaagtagtgtcatccccaaagagtagcaaatcctcataagggaaccacagtaggtgaaagactttgaaaaaaaatcctctgttgtgaatattaaatcccagctcttccattttgagacaaaaagggcttatcttttatcttagtagactgtaggctcctttagaataggacctgtcttatttatttctctagcccaagcttctagcatagggctcaataagtatttgtgactacgtcatacatactgactaaagtggaagcctatgctattttctaatagcttgtcatactccctagtgttctacagaaagagtcactagagtttgtttccatttggtttgtttatgtggggaagggcagaaggagaattattttgctttgtttttgagatgtgtcctaatccagtagagatcaggatgagagcaatgaccttgtccgtcaggatagtccgtcgtcccacttaatgagggaagacattggatgatattatcttccttgtgatcatcactcaagaaaataattgtggactcagctttagtccacattactttggagttttgctgtattttcacctcaagtattgtaaccacaccattttgtggctccagacccaccatggcttccaaaggctatgcagaatcattaggaagctacaagccttcccactagcccacactgctgctgcagtatgcacttatctggatcacccatgagatcaacttgcaaacaggaactggcttatgaagccatgcttgctctgagaaacataatggtcatctcactgccagtggaatgtaatatttgatgtcatgacacccttcctgtccaacttggcattggcagttggtttgacttggtggtgagaaatacaacaaaacgatgagaaattttccttctggagcacttcttaagggagcttggttgctttattggaaattcgtacttcttagctttcatgaaatgtccctttggtacattagtgagaaggttcaaggcaaaataaacacatttcatcttgaccatatttggaactcacaatataaaggagtcaaaaggtaagctgatgaaataagaatattttatccttttattccacacatagtttttactttctcgcctttcctgcaataactgcctcaacatggtggcactcatatgcgttttcaaaagattttcattttattatgtattgaattatataaagtagtgtcagtaaatccattagaaattctcattcccaactcttagaattcatctacaaagagtcagaaagaaaccaagacattaaggagaagccagtggctgcagctgcagggtctttattatgtttatttgtgtcataattctctttatttgccgaactaaaatggtttaaagttgcagtgcaccaggtaaggcctcccttactgtcttcaggtgtttgtttagaataggtttgtttgtttgtttgtttaggaatagctgctgtaatgctttgaattcccttgccaggacacaaagtcatagaaaatagcgaagatccttgctgtttacttggggagacattatctacatgcacgaaacaatttaattcttaagatttatttaaaacgtgtgaaatgtagttgcaataataataatagatgatatttacagagcacttactatgtacctggagctcttccatgtgttttcatatattaacacatatattaaacttcacaacaatcttaccaagtagccactcttacaatccattttacacatggtgaatctgagccacagaaaggttaactaaccagcagctcctaagtagcagagctaggatttgactccaggtggtctggctccagggcccaggctctttggctaccatgtgtatacactttctgaagaattacaatggtgcagcccgaagtcactcaggaaagctgttagtggacaacttggttctggtgcagaaccttaatgatggcctaaggtttgagctgtgaagaggatggaattggaggttttaggaagcaagaatagcagaaagagaagctggggtttagaaatgaataaggcatgataggaggaatagccatcttataaaatggtgtgagaaaacttttatatagagccttgagcaccaggtttaaagtttgaaacagaaatccataggcaggtatacaagcaaggaattcattcattagtgcattcatatacttataacactagaaggaccttagagagcatcaatgtcaactcctccttttatatttgtagaatctaaagatctagagggttgaaatgactcccagtgtcactcacctagtggcagcattagaatacagcataactcttctgattcatcatttaagctttaagcctatttccaatgttccaggacactctgaaagattctcctggcagaggcatttggttgagcctggaagggagagacaagaggcaaggtgacctgtgaggcattattgcaaaatccaagtgaagtacaagaggtacactgggctcagtgaaaacagtagaattttccagagaggattgagaaaacatgataggatatcaataataaaggagctaagttgcctccaagctggcatagctttggcagaaatagggaaattgggcaatggtaccacttgggcatagacagcatcagttcaggtttggtacctgtgagagggagttggctttattataattacttctgtatggaaccttgtgtaacatgatgatcacattccaaggccctttgcaatttttccattaatcagttgccaccatcatcagcatgtgagcaagtccttgtcaaccctgagatgaaatttaactcagttttgctttaatatccattaggctccatcctggcctttccttttcttagtttctttcgctgccaatcagcttcatacgtgtccactttcctcagagtctgtaaattatagtggtaaagggtataagctctgaaggcaaatggcctaaatttgaattctggttctacaacgcttctgtgacttgggcaaatttaattctttttagaattaattctttgtggctcagtttcctcattcataaaaagatattgtgatcagtgcttatcttctagcaagaatgtgaatattaaatgagttaatacacataaagcccttggaatggtccttgcacgtagtgaacactcaatacacagtagctgtcattgttgccatcctatcattcccctttgctgcattatagtttcagggcgttctgtctctaggacagcctggcaagatggagttcttcctttccaccaggcacgctgttcctgtgactgctattttaacattagcatgttattttcgcccctagaagctcctcctgtttctccagcaaagctatcctaggcccccagttcctcaccacatctgagtctctccccagtaaaccatctttcaccttcatacatatacacatacgacttaaatttgtcccagcggagggagggagtgacccctttctccttttttatgcaatctcacaacctgaaattgtgatgaggctacaatttaagtgtttacccaatttaagtgtttacaatttaactgtttacccaagaaatatcagatttagcagattataaattgtctgcttctgaagcaagaccaagaagggattaaaagcaaagacctgagaggcagctgaacctaggttcaaatccaggtttcacatttatgagctatgtgactttagatcgaataacaactgagtcttggtttcctcatctataagataggaatacctatcttgcatgttgtaaggattaaaggttataaactttataaagtaggtaatttttaaccccttgcccgattcccaccctctcacctttcatagtctccaatgtctattatttcactctgtatggtcatgtatacctattatttacctcccacttgtgagtgagaatatgcaatatttgactttctgtttctgagtcatttcacttaggataatggcttctagttccatccatgttgctgcaaaagacattattttattctttttatggctgaatagtatgccatggcatgtgtgtgtgtgtgtgtatatatatatatatatatataacattttctttatcaaacctttgttgatgggtacttggattgattccatgattttgctattgtgaataatactgcagtaaatatacaatgcaggtgtctttttgatataataatttctttccttttgggtatacacccagtcatgggattgctggtttaaacgataggtctgttctaagtttttgagaaatctccatactgttttctacaaaggttgtactaatttacattcccaccaacgatgtataatctttcccttttctccacaacctcaccaacttctgttgcttttagactttttaacaataatcattctgactggtataagatgatacctcattgtggtttcaatttgcacgtctctggtgattagtgatgttgaacattttttcatatgtttgttggccacatctatgacttcttttgaaaaatgcctgttgatatcctttgcccactttttaaaggggttgtttttcttcttgagctgttggaattccttacggattctgggtactagccctttgttggatccatagtttgcaaatatttttcccatactgtagtccgtctactctcttgattgtttctttttgctgtgcagaagccttttaatttaattaactctcatttgtctatttttgtttttgttgcatttgcttttgaggacttgctaaaaaattatttgccttgggcaatgtctagaagaatatttcctgggttttcttctaggatttttatggcttcatgtcttatgttcaggtctttactttatcttattattattattaatcattattttggacatggcatcttgctctgttacccaggctggagtgcagtggcatgagcatggctcactgcagcctcaacctcctggactcaagcaatcctcccgcctccatctcctaagtagctgggaccacaggcatgcaccaccacactcagctaattttttaaaaaaagttttttagagacagagtctcgccatgttgccatgttgcctaggctggtcttaaactcctgggctcaagcaaacctcctgccttggcctctcaaagtgctggggttatggccatgagccatcactcctggcccaagttcatctttttctatggtgagaggtatgggtccagttttattcttctgcatgtggctatgcaatttttccagcaacatttgttgaatagggtgtcattttcccagtatatatttttgatgactttgccaaagatcagttggttgttaggtatgtggctttatttctgggttccctattctgttccattgatctatgtgtctatttttatacctgcagctaaattttagtagtagattgaggtggcttctctgaaaatacagatgaggtagcagtgacacctctgagtgtcacctcctcttagatggagtttagctttattgagggcagaccttaaacactctttatgccaagttttattagcttgggttaattgtatggccgcggtggctggtgcgaaattgaccaaccctaaatattagtatagcttagttaaactttcgtttattattaaagatttatcactgctgtttcccgtgggggtgtggttgagtaaggtgttttgagctgcatttgtgtgtgcttgatatctgctgcttttgatctgggtgatctagagggcattttcactgggatggagatgcttgcatgtgtaatcttactaagagctgataaaaaggccaggaccaaacctatctgtttatggggttgtgcagacccatctagacattttcagtgttttgctttgaatagttaagctgcattaactgtaaaaatgcttaagtataaaattaaaatatgaagaagaaacaagtggtccctgtccatgaaagtaaccttgagggtccttcctactgacgttagcggcaatgacgttcttatcactgttctgtgcattcaatagaacaagaaaaagtttagggttacagcacgatggaaatgaactcccctgacccctgagagtcaagtgctgtttggattaggattttagctatttttcccccatattttctttcgttttcattatgttctctagcattactatagtctgtattactgtgctatttcatattctctcttgtaatttttttcactgttgaaagtaataaatatttattgcaaactttaagtaatatagacatttaaaatgaaaacttacttttctcctaatacaaaaaagcatttccccccctcccaaacctgcaaatgactcaatgtatatgctgggagtttttttgttgttctgttttctgttaatctttgttttttggtttttttaattttattattattatactttaagttttagggtacatgtgcaccatgtgcaggtttgttacatatgtatacatgtgccatcttggtgtgctgcacccattaacttgttaaaagattaatttttattacatcctaacaaaactagcagagagagaagtttaaaagaaaaataggtgttctgcaggtctctacttgattatgtaggaaaattataaattataaatacaaggagcagaaataccctcccctgctgaaatatcttctacatctacaggaacacgacccaaacaggggacatggttctcccattccctttgagacaaattttagtgatcagcttgaatgctcacatgaggagagttttagatctcctaaaatgacttccaccccaggctgccccaacctcacactctgatatgccaccatctatgcctaacagttctcacttgaaataattctggcgaacttaaactgtaaagcattaaatcaaagaacaaagagaggctcacagactcatgggaaggccagagaatcagacacaaaacccacacaggggacaaaggaaactcaaagtctcatgccacatgaacagtgtggcttggtcactgccatttctggggactgtgcgccacggctgatgccatgtcactgagtggtgactgcaccatgaccaccataagccctaaactgtccaggcttctctgggtcactcactctgatattaaacacccatgggaacatgcagttgaccttctacctcacagttgataatgggaaggggattcagatgatggagagctgaaaaatgacaaatatttactttccttcctgtccttctctacctgctcacattctaccttgaactaagtatgcagcaagctttcattcttttccaaaaagagtttttagtccccacagcattatcaatcccattttacagatgggaaaaccagaggataagtgactatagaaggtcctagagagtatttatcactcctagatttttgctccatgtacaggttttaaaacaccaccatccactattgttttgttttggttgggtttttgtttttggttttttttgttgttgttgttgtttttcttttttctttttttgctgatggaatctttttttatttttctaatgaaaccttgcaagaaactgcaacatctaaggcagatcaaagcagatctgcttgggttgaagaagggtgagggagaacagagccccatctgcttggcctcacactcctcatttcacatacacaaaacactctccactgagggatgaaaatgctactgccagcctcagccagagagcctgatcattcctggctcattttctgttactacccctctggttctggaattggggacaggaagtagctctgagttcaaatagagttagctgtgcataaccaactgtgtccatgaccatggtccagctttcttaaaacaagttccatagaacacaagttagtccagatatcaataaatgatcacgtaaatgaggctgtgcatggtggctcacgcctgtaatcccagtgctttgggaggctgaggcgggtggatcacctgaggtcaggagttcgagaccagcctggccaacatggggaaaccccgtcctactaaaaatacaaaaattagtggggcgtggtggcaggcacctgtaattccagctatgcaggaggcttaggtaggagaattgcttgaacctgtgaggcggagattgcagcaagccaagatcgtgctaccgcactccagcctgggcaacaagagcgaaactcaaaaaaaaaaaaaaaaaaaaaaatcaggtaagtgagaattttttaaaaagttttgttaatgttggatttctcaccttgtctaaaaatatagaaaaaaataggtttgtaattcccaataaattgaaaacattttttacctacaaagaaggactctccgagagtgtcatgacactgcaaagaggcagaatgatggtgagatttttccagatgtttgaccagagaactatttttcaagttctatttctcagaggcagcctcttcgatttttttggtttgtttttgtttttaaacacctaccaatatcatttggctatttttggaggaaggattaattggtttgtacccagcaatttttttttttacaagtgttcctctaaagcttgtaaatccaagaagaaatgctaaattcacccaggaaagttaaacccctgactccctaatagctgaaggatctggtttatgcaacagcatttctctgtcaagtaagagtacagactgtgtggcttagaactcagaaaaaccctaggcccagatactctcagaacagtaacgacagtaattacaactctctaaaaggggtctgtaaagttcaattacaaaagacagtgaggtgaagggatatttgctttcagactcacttttttaaaatcctggtggctgtatatttactcctcaaggaaaatggagatgtctccaaagatctgatccaaatgcaaaaagtgaccaaagttttggagaagaaataatttaactggttggaaggcatcaagctgcccagagcaatctcttccaggtggacagctgtgacttactgttttactctgtggaagttaatgtgtagcctgatttatatatacctcgcagtcccctgttgcctttttcttcaaatgaaacctgctcagcctggattctaatatcttcctcaactgcatctttatctcaccaattcattctcagcttagataaatcactgacccaatggcagctgctgtggggttttttttggttcattttgttttgttttgttttcgtataaaattggagcaatcagaacttctctgtcacctctgagggctgtggtgagaatccatcatgttgatcagggccaaggccagtccatactgcgtctttgtgtaaattaggtaaaggcagcccttctggaagtatgtggtggtgttgaaaacacacagaagaagtgatgctggcagaaaacaaaacaaaacaaaacaaacaaaaaaaaactttacattaaaggaactatcagagatagttcacctcattgaaagtacaaaggacaaagtggtggaagctgatccagacttagaagtatgacaatttgcaaaaaagatgcttgctccacattataagttgtacaatgaaagatagaccagcattattcaaactatttctgataagttttttacaaagaaataaaacactttaattctcaacatttctatattttaaattcagagtactaaagattaattttactgttttttcttttctttctttttccaagacggctagagtgcagtggcgcaatctcagctcactgcgacctctgccttctgggttcaagcaattctcctgcctcagcctcccagttagctcagattacaggtgtgcgccaccatgcccagctaacttttgtgtttttagtagagacggggtttcaccatgttggcaaggctggtctcaaactcctgacttcgtgatccaccctccttggcctcccaaagtgctgggattacaggtgtgagccaccacatccggccactattttttattttcttatacatttataaacaacagtaagagagtttaatgacaaaataattttaaaggttacagaacaattggattttctccactgattgttaagatcactttgcatgattctagctttcatggtcatttttgcagtctcacactatcatgcaaagtgacaactgcccatacctatatatactccataggaaaaaagttaccattacaaatacaccaaaaagttaatataggagttggaattacagctggttttaattttcttttctgaaattttcatattttcaaatgttcaacaattagcacatgttgcttttgtgatcagagaggaaattgtgatttacaaaaaagcttggtttaaaattcagctccattgagagttttagacccctttgactggctctctctgtcctcggttcagagtcctttgatcaaaatattgttaggatgccttgttgctgaactatagctctgtaaaggcatttgggttattgcgtgtgttttaaaaattatctgaactaaactaaaatttctcgtgtatagaaactatgtatttatatgttatccttcccatccctggagccctgtacagtgttttaaataagtagtaggtgctcaataaatattctaacctatctctcaaaaacttgccagcagttgctgaaaaaattacccaaagagcatcaaggaacacattagatgacatttgaacacgatgtaataaatttcctgtaaaattacttgtgttctactcatttaattaaaaatttaatttccctgcttcaaacaacaaattattgagaatctagaggctcctaaatcataatggttacattttttggtttccatcgtaactgtaattcagccttagagccttaacacatttctttagattacagcaaatagggttaaatttttaatctgtatgtacatatcaaagcaaagttctgatttttatagaagccacaatttctatttttaaatgttcatttaaaattaacaaaatatcttacaaatgattttttaaatatatgtcctttattaaaaatatatgaagtgcaatgaaagacaaaacctgtgcattcctcattgtagcacctatttttaaggcttccctatctgagtcagctcagtctttgatgtgggaggaaagggatataggcagagctgatggttatgtgatgttattttgtcactcagtttagtaaacaatgcctttcgtagtttttacctaaaccaccttcttattttttatggcatcctgatgagctgcatttcattgcagggtcctcggtgtaactgatgggatgttaacatatctgcacctgcagagggaagtcatgtgggtgaggagagtaggcaagggactctataacactgccccagcgaacagctccagatttcccttctgacaaagagagggtatttgtaatgtagcctctaatgcagccaaagaaacatgctgaccttcttcttggattttacattcaccctttcctgaagaatgtgaataagtggaagcaaagacaaataaatcctaatttcaaaatatatctagaatttttagctcccctctcacagcttttaaaataaaaacttacttgccagattactaaattgtacctgtgacaacagaaaaatgaatgtcagcagagcaagctgtgttgtaccagcagacagttggctgctgcacgtatattcctgtgcctctgaatggtcttgcttcgcatcctctgccctcagccttgtgagactgtagtgagcacatgactgtgccagacaggggtgaacttgtgctttctaatgacgaatccagctgttttgattctgtcttctctgctggagttcgtgggcttcattctcaaagagaataatctaggtaaaccctgactcccgtttctggataccagactactttgatatagtaagtacaaaattgaagatggcaatttgaaatatgttatgtgtatatataaatacacacatatatctatatatacatacacacacacacatatatatgtatatatatatgaaccacacccccaactctacaaaattttcatttctcctttccaagaatagaatccccctactttctgaagcaaaagtaagaccaaacggcttggcatttacagatatactcagagggacaacagaacagggtgtgtgaaatgggaatgccacagtgaattactgatggaacctagatgaactcacgacatttcttataccccctccagagatttactaagaacaagaaatgagtacatgttttgtttgtttgtttttgagatgaagtcttgctctgtcaccctgactggagtgcagtggcgcgatctcggctcactgtaaactccacctcctgggttcaagcaattctcctgcctcagccttccaagtaactgggattacaggtgtgcaccaccacgcccagctaatttttgtattttatttttatttatttatttatttatttatttatttatttttttgagacggagtttcactcttgttgcccaggctggagtgcaatggtgcgatcttggctcacggcaacctctgcctcccaggttcaagtgatactcctgcctcagcctccccagtagctgggattagaggcatgtgccaccacgcccggctaattttatattttttggtagagatggggtttctccatgttggtctggctggtctcgaactcccgacctcaagtgatccacccgcctcggcctcccaaagtgctgagattacaggtgtgagccaccacgcctggctaatttttgtattttagtagagatggggtttcactatgttggtgaggctggtctagaactcttgaccttaggcgatccacctgccttggcctcccaaagtgctgggattacaggcatgagccaccacacccggccatgagtacatgggttaacccttgtccaccccagggacccaactccccactgtgcttggaaatgggaaataaagcaggaagagtccctgttatttaccggtggcaagactctggccagaattgttaagcaagagcaaaattggctgctttggatattcgttccttcctttggagatggtgccttcaggaaaattatcagaacttgcatagaagagaaataaagaatgatgagctgttgggttaaccctggatactcagcctcaacggaaggggtagggagtcctggattgtgctagacaccaaaggagggagcctgtagttctcatcccgttctgtgctaggagaccacatggaccaatgagccaaaactcttggaataggtggactaagtagatgcttaagcaatgtgatttgagagcgacccgtcttgccaaagctgcatcagtcccctaactctgagtgcctggaattctgactttcagagtaccacttttaggctaaggcattattgacagaagatccctttgaactcaaatctgtaccctggaaatatgatgtattttgttattagatcccattttctcagattattctacaaaacactttagcatttccttaacagagtctgggaaacaggatactctgaaatcaaggaacatgggactggtaaactttgattatgttggaaaggtagagaccaaaatctacttccagggcagacagggatatgaaagtattgttaacagtgtgaaggctcatctctggagtgagtgaagtgtcagaaagaaaaagaacatttataggggagtacatagggtgaaccctgacagcatgaaatccagccacatctgccaaatcaaagatggcaaggggaagcccttctgtttcatggaaaagccaattaatgaggatgaattgaagataatattgtagatcaattacatgctgtaaaatataatgtactagcttttccatatggctatagactatggttcatgaaatttttcagtaaacaacagtttgccttccttagagtctcaggcaataatgagtcttctccattctggttttattttaaaactaaactattgtcgataattaattaatggtattctaatgtaaacagaatataagtttcacaatcttgaatttatttttcctcttctttggggtatgtagggttttacatattttggtttgtgcttatggaaaaatgttttacttctgctgttgaaatcatagccacccgctgttttctatagttatgaaatattataagtcttgtcacttgcagaactaatgttcccactgagatgcctctctagcctttttgattaaaaagcagcaacagcaaaagacacagcctgggactgagtgacctattatttttgtgtctcatttggtcacagtaattctcaacccatgcttcacatcagaatgaactatgcagttttttggaattgtggaatttccaagaggagagcctggtgtgtgtgtgtgtgtgtgtgtgtgtgtgtatgggtatgtgtgaaattccacaggaaatctgatacgtagccagaatcaagcaccctcacattactgatttcagggagtattgcactgtgaaccgtgtaagcctgaggttgggaggtgatttaaattctattataagctgatacctactatctaagaccctgtcaaatgatcatatcaaaatattttgtgttcattgctctctctgcctgattgtttctctgatacttacatgaaaattagaaaaagtgtactccttcgtaagtttacccatgtggctgagtgtcatcaataatgactttgtgtagctttatgtatgggaggaagtgttttgcatcctgagggtggtggcctgagctgtggctgagtctcaaggctcatggttaagcagtgacgcttctgtggcctgtgaataccacttgcaatgtggacacattggtgggtgagagttactctgagcagagccccaccgcctggttcaaaagttcatgggcccagaaagagcaatgatagtgtagagactcaagagaaaagctgtctttcacacaagagcattcagagaagccatgcaatgaccagctcatccaaggcagacagcaccccgcatgtatacgtggggtcctcagatctgctgctctgttgttgcaagtttatacatcacacagatgcctccccacttaggaaaaactgcatcgcatttaactaacacatgtaaatattcattttataaatatgcaattttataggagcctgattgcaatgtgtcaaagagggcatttgctcatgaagcaatgttacctatgatgtgcataatcattcacacattttttgtaccatgtggtaaatacagcaacagacattatctaatgtgtgccacagaatgcactaggtgatatgggagctgggagatcatcacacatgcattctaccatagagagcttatcttatgtttaaaaaaatgaaatatatgcatacataactagaatgcagggcagaatatggcacatgccacacagtacaatggaagtacttcgctatttcagcataaggagattgaccctagctaaaggcaattaggagtcgctccctggaggagacagcatccgcccttcattttgaaggctatataggatttggacaatgcagagtttaggggagggaccagatgtggaggctttccaggcaaaaggaacaggagtgagcagaggcctaagatggagacctagagcctacagcacgtttggctggaatgcagaatgtgtaacgaggaaaggcagctctgccaccctgtagaaggccatcctggtcaatgactcagcttctctgtgccccagtttttcatctgtaagtggggataatggtgcctacttgatagggctgtgtgatgaatgaatgagctaatatatacaaactacttaaaacattccttggtgcatagtaagtgttctataaatgttcaatccaagttattaaagaagggggtaaagaaattccaagaccagatgatctctaagatggttccaattccaaggtctagcactcagggccactgagagttctgactggtctctgagggtggagtgcagcgcccaaggctgccttgccattaaacctgatgacagtttggagaagtgtgggaagagactgaggcctggaaacaaggatgattcaaaacagatgcagacggctgccccccaaccatccatttttgctgttaatatgaatatggaatttgaagaaaagggcaagaagccattttatgctattccctgatttctccccagtggaaaattccctattttgaattgctttcaactgtcttttgtgttttcattgacaatgaaattatttaaaaagaatgagagaaaaacagctttgctccagagaggagaaaaaattaaagaaaactaatttctccccctagcccccaaaaaaccaaaccagaaattaacattataatctataatcacagacacagaaagtggtcccaagagccaaacctcctccattcccttcctgcagaagcaccccaagtgtgattgagaataaatgaagggagttgtcagggtatggggtgaatatcagtctgactgcttattgttgcatgtcattgcctttcttctttctaaaataattttaacttttagtttagattcatggggtacatgtacaagtttgttaagtaggcatattgtgtgatgctaaggtttgagatatgaatgatcccatcacccaggtagtgagcacagtacccaataggtagtttttcagcccttgtctccttccctctctccccattcttgtggcctccagggtctactgccgccatctttatgtccatgagtacccagtgtttagctcccacttatcagtgagaacatgtggtatttggttttctatctctgggttacttcacttaggttgcatccatgtttctcaaataacattatttcattattcttatggctgtgtagtattccatggtgtatatataacacattttctttatccaatccactgctgatgggcacctaggttaattctgtctttgctattgtgaatagtgctgcactgaacatacaagtgcatgtgtctttttggtaaaatgatttattttcttttggataaatacccagtaatggtattacagggtcaaatgtagctctgttttaagttctttaagaaatctccaaactgctttccacggtggctggactaatttacattcccaccagcagtgtataagcattcacttttctcagcagccttgccagtatctgtctttttttttttttttttttttttttttagtaatagccattctgactggtgtgaggtggtatttcattgtggttttgctttgcatttctctgattattatgatgttgagcattttttctatgtttgttggctgcttatatgtcatctgatcttcaacaaagttgacaaaaataagcaatgggaaaaggacttcttattcaataaatggtgctgggatagctagctatccatatgcagaagaatgaaactgatcccctccctttcaccatatacaaaaattaactcaagatggattaaagatttaaacataaggccacaaagtataagaattccagaagaaaacttaggagacaccattctgggcattgaccttgggaaagaatttatgactaagttctcaaaagcaattgcaacaaaaacaaaaattggcaaataggacctaattaaactgaagaacttctgcacaacaaaagaaacaatcaacagagtaaacagacaacctatgaaatgggagaaaatatttgcaagctatatatccagcaaaggtctaatatctagaattcatgagaaacctaaacaattgaacaagcaaaaagcaattaacctcattaaaaagtgggcaaaagacacaaacagacttctcattgcctttctaaggcaggcacaggtttccttagttctggctcttttttcttcaagctttgtagccaggttctgaatgaataccaccccccaggtaaaattccttgttaaatgctgaaacacatacctttgagaacctctcacttctctgtaaatggttctttttgcatctagtgtggcctctgagtgtacccatggaggctcctgggtcctcagagtctggacggggagccaggagtcctggcctctatttcagctcccgacggccaacctgggcttcaaccacagcacagactcctgactactcccacccaaaaagagttgttggaagacttgaaatcacagatctgagaactcctgcactttgtaaattcaagatgacattgttactgttctaatttttttaaaattacagcactctcactttttctccaaaaaaggtataaacaagaagatagtttgacttgtttacctaaagctctcctttgagttgccaagaggagttagttacttgaacacagacacagaaatacggtcgatagcaaaataagatatgctgagctcaggagcttaatttttttcccttcattgagtaacatttcagaaaagcaccagtaattggaacataatttatttatcaacaggaattcagaatactcccttgcagttgattttggaaatccatgtgaccctagcagagtgctataaccaaggtgagaaaggctagaaacagacgtagaattacaattaccaaagggagaagagttcactgtgaatatttaacacacactggcatttggccactaaactctgggtcttccttcaaagttcctgacatacccatttataaaggaggttaataatccctttgtacctacacccccacagttacagctaaataacaattttcatgataagcctttatttttctgcaacttagaatttaaggcagcaatttcatctacaatgtttaagcccagaatttatttttggccttttcaaaagaaagttgtacccatttaacttcgcctggcaatataagagaaaaatgtttttaaaagtacagattttaattaactaggcaatttgcctttctctgaacaatcaaaccctggccattgccaaaggcaggaagccagactaagcagaaccatggttagatacagggaggcaatgtcaagggcttgcagcaagcagcagttgcccatagcctgggttagtaatatgcatattattttaatatcctattagcacttggctttgaaatgaaaattgggtgactaaagacaaagatttttgggcagcaatttttagaacatagaggtaagatgtgtttttcaccacttgctttaagaagcaccctgatgcccagatgttgacctttaagctacctctcctagctctggggtttcctggcatttcatgggcagacctgtcccccagcatccactatgctttgggtagagctgagctccagcttttgaagcctctggtcagggttggatgaatggcaagcaaacactgccacaagagaaaacctgctggctggcagcccctgggtcaaagcttgttttagtttcccgagaccacctttctatgagacctcagagaagggttttactgccccaggggtgtaggatgtgatttttaggaaaaaagactcttgcaatttcaagtctgggtaacttatctttctttgcctacctggtgagaggatacctttgcaggaaatgctgtcacatcaaccctccattgccctatttctctttgcctgtccaagggttaccttggaattagtggtgaaacttccaggttcagtcatatgctaaaggactcatgaatgcattttgtttggagctttacaaatctctagaaatttagtaaatggctcaagaactccctctaagctcaagttgtttaaattttatttttctttttatcatttatgcacaagtaaaaccatgaagtagtgacttcaactggataaaaggcttaagaccctgaggatattgtgaagccattatccatgagaggaagaaggcaaggtcctatgtctaccaacatgcagacaaatgtccctgactgcctaggcttggtaacattgagcaattatttttgtccttatcataatttagtcatttaatttctttatcattttcttggcagttaatagcctctgatttgaatttttattttttcttgtaccacagttgttctgcctccctgattagattgtaagcaccagtagataagtcatcttagcctacttggcaagccttataataccaaaatcaacttcctaaatgaagagctgggtatccagccactcaaaaatgttttccccaacattccgttagcctcactggtacatgttcttttaaatggaaattctcaaagggagagttgatccccactaatcactctttaatgtgaattaattcagtcagataatcagatgctccaagaaatagaattaaagaaaatagaagtaatttttgaacatatggaactctgggagagggtggccagcttactaggaaaggactttggggtaatcaggagtgtatgtccgtgtatgtgtgtgtgtaaatccaggagaagggagggttggaaagagaattctcacaatcctataactttgtggctagaaacagatgtaggcttatgtctctaaggatgaatggatgatttggagcaagaaaggaccagtcacttgcttttgtatgacacacagactaaaggtagttttcacatttctaaatgattagaaaataatcaaaagaagaagactattttatgacacatgaaaattatatgagaatcacatttcagggtctataaataaaattttgttgaaacatggccatgctgattcatttatggattgtctatggctgcttttgtgctatgatggcatggctgagtagttttgacagagactgtatggcccaaaaagcctaaaatatttactacctgcccctttacaagaaaagcctgtcaactactgatttagagcaaagtgtttgtttctttttcactttcatgcatttgggtgaacagttttttaacacttataaaatatttcttccctttcataaaatattagaatatacagagataattacagagatgtttatcccaatattattaacattcaaagaaacaaaacttcatgctaaccatgtggtactggtgaaattatggtatagctatacaattgattgctgtggaataatttattggtgctatggtctaaatatttgcatcacctcaaaattcatgtgttgaaatcctaactcccaaggtattaggtgatggggtttttaggaagtgattaagtcaagagggctgagccctcatgaatgagattagtgcccttataaaagagactccagagagccagccagctcttccaccacatgtggatacagcaagaagctaccatctaccaaccagaactccagccctcaccagacactgaatatgccagcaccttgatattggacttcccagcgcccagaactataggaaaaaaatttctatggtttataagccacatagtttatgatactttgttataactgcctgaatggactaagacaagtggcataaaaactgtttccagttttaactctttatacaacatgaacccataaaaaatgtttcaatcaaaaatatcatcaaaaagccataccaactttcagatatgttgtatctgagtggtggattgcaagtgattttttttttcttctttttgcttctctgtatttcttgaatggtttacagtgaacaaatactacttttataaaaaggaaaaatacataacgaaaaactttcctttgatactagagatggttagaaaaaaatagaacaaaattataatatgttagatattttttcatccttccctaaggtaaaaatgttctcctgggagacagtggagcaagggccttggcatcaaactgctcactggggttgagaaaccaagactgccagtcactagttacgtaacctggactgaagtgcttgctatctctgaacctcagttttccgagttctcaaataaggaaaataacatcctcttagggcttcttcaagcattaaataaaatcatacatagaaaacaactaactcacatggtgacaggcacataagcactaaaaaaatgactaattttcaacatattttatgtagaatatttgccatacgatgtcctgccttccacggtaatttctcttgtgatacaaaaaaaaaaaaaaagtccctaagatgaaatacatggagtgaggagcagaggaaggtgagggagtgagtatcagagcagtgaggagacagatgccaactatcctgagcataatggaaaatggagcagttcagaagagccactggctttgtcatttggtcaggaagctttcattactacttgcaatagtgagagaccgctagattgctgggtgggggcagaatgtctgcatgtgtgtgatggtgcaggtctgggaggaaaatttttccaacagttcacagtatagttccacagttttgagcacccattgcgtgaaaagcaccggagattccaagatgtgtaagatacagtacattccagagtgagctctggccttgtggtgggttggaaggaatcgctttggagtaaggcattgagcaatcacttggaatgctacttacttgaactggaaactatgctttccagattattatcattattattattagtgtgctttcaagattattatttgaaggaattcacagcaagaaggaagattcttactaaaatactattaaaatcttcatgttttgcagaaatcattggatataattgggccagaaataaaaagaaacactaaaaaaactaatgataagttgggggaatagatgctaagagcttaagagaatgggaagaggtgaagagaaagttctatggcccattgtatttcttccaccagatgccaaggagcatcccttgggtagaacaacgtcaactagaaactctgaagtgtgccatattcttttcatcctccttgtctatcttcttgtccagggaatactaactactccaagagttcattttccacctttatactcttccaggccctctccacgcctctgtactcccaacctcctcaggggccatgctaatctctgtatcatttcaattttagtatatgtgctaccaaagtgagcactgcttactcttaatactggcacaagtgaatatattccagtcctgagattatatcgttgaagtgtaatggcctatgcgagctgtgatctcaagatacatgaggggtaaaacaaacagaaaccaaccaaaacaacaccattgctttgtgaagttccctgtatctctacccctgcctggccacccatctaatttgttacatagtcattacttttttatgctatttacttctctgcaggtttctttttttttttttttttttattgatcattcttgggtgtttctcacagagggggatttggcagggtcataggacaatagtggagggaaggtcagcagataaacaagtgaacaaaggtctggttttcctaggcagaggaccctggggccttccgcagtgtttgtgtccctgggtacttgagattagggagtggtgatgactcttaacgagcatgctgccttcaagcatctgtttaacaaagcactttacatatatttgcattacattatttattccaattttaggatgggtttgaagaggatgggtttgaatttgctacatcaaataagggaaagaaatcattctttcttaatgtctccacacgtgaagtatttggagtccctataattatgttgcttatgtcttaccccaaaagatgtatgctctacttgaatgtccctcgtgaaaatgctgagagagaatatataccttaaaaggcacttcagggaggtgtcatgcccccatctgcagaaatggcacccagcagatcaagactatacaggattagctttctattggatctggaatatgactctttctatcattggaaatggtatgtgcaaatgttgctaacaggatgtgggctatacattttgagacctgttgaaagagaaggcaaccagagtcacaagatatcactttattcatctgtaaagggaattcaagtggtcatatcaggaagagctgtacccccgagtctcagaacttgtgtccttcctactgctgaggctggatacactgaacccactccactttattactcaggctccatgctgttgtcttcagagggtcagagaaattggtgtcttaattgaaaattgataatgcagccagaagtatgatgggttagtttctgaggctagagaaagtgtgttctctccagggtaaggtaagcgttatcctttgccatgcctgtgcatcacagtgagatgccaggaagttctaggggggtgggtgtagtcaagaatgtgacatcaagtcttcaagcacttggtagcatctccttggccttctggcctggggaaagaatgatccattccacacaaatatcctcaaactcaccaactcacacacagccagtaatacacatggacattcagaaatacacaggcacagccatacgtacaacaagcacacatattaatgtatatacacagtcacacatacaaatatgcacatgcccacacatataagcacatatatgtgagacacatgcacatcctcacatacacatgcacatatgtacacccctgctgggcactctgcaggccttttccaaggaacaatctctagtccccagccctctcccatcacctctgtcctaatgatgctctgaccctgggataatacttaggtgaccctggctctcctgggctcagtccatgaattatttctatcccaatagctctaggattgagtgtctgaaatgaatgctgaaaagcagggaggttgcatgtattagttggggtcctccagagagacagagccaataggataaatatagggagagatatgagagggaatttattaggggaattggctcatgcaaatggaggctgggaagaccgtgacacgccatacacaagctggagactctgggatgctcaggaatgctgacctagcatggctcagcccaagtcctaaggcctcagaaccagggaagccaaaggtgtaatgctcagtctgaggccaaaggcctgagaacctgaggtggggagggggctggcataagttctccagaccaaaggctggcgagcctggaattgttgttcaaggacaggagaggaatggtgtatcccggttccagcagacaggtctgcactttcttttctgtgtttattctgtccgggtccccagtagattgaatgatgcccacccacactgagggtgggtcttcccccactactcccctgaggcccacatgctaatctcctctggaaacaccctcacagacacagccaacacagtgctttaccaggtttctacatattccttaacccagccaagttgacacctaacactggccatcacgctgctgtgggggacagcgggagaatggaagaaaggggtgaccaccctttcttcatccatgtatgtgcaggatcagacgacttcttccatgtcttctgactcacactatgaaactatcaatatttggtaccttagggtggaaagtgtattattgtgtatccagtttaaaactgagggggcaaacggggcatggtcatgaagaccaaagaaagaattggccctgccactgaggtgccaactctaatgttgactgacaaagaaatgactaggttcaagtttctcaaatttacttgaccatttttcatcatccaataatacatgattgccatgtaagtaatatttccaaaatacaggtaaagccaaggtctccctccctcccccataccactcgctcctcagggatgatggctggcagcaggaagtggatggtcttccagtctgcacgctttgttgggctttttgtcctaacacagatggtactgcactacatgaatcatcttaaaacttgccatttcccttacttaactatatgtctaaatgggctttttattaagtgactttaaaatgaaacaagtcaccggccttccgggtggggcccctttcccggtttctgccgagtgccacgctgtgcttgcggttgcggttccgtcaggaatccctgactctgggttcctgccttttcccatctcacagtcacagcacttgctttgcagtgtgtctgggctcctgcctgtctgctgtggccacgtgaaggaagcggagtcgtcttactgtaattatttgaggctctgggcagttttctgtgcatcagatccagtaacacaaaacagaagaaaaccattattcccaaacccagctatttactctctcccacacagctttttctgggaaaaggagactgcggtgatttgggagagggagctgtgcaatccccagctaggagcctacgagctgtgatctgcagagtgtgctctgggcacccaggactgccgacctaggcaaagtggaacaaaatatgagaggttcggcttgggatcctttgccagagagagtagcctggtgattaaaacaacacagacataatcagacttttccctcaaatcctggttctgtgaccaccagctctagaatctgaggtcagatacttattgtttgtacacctatccttatcacctggaaaatggctgtagtagtaattacaactttataaggttttgtgaagcttaagtaagagaatgcatggaaagtccttaacacaatgcctggcatgaagtcattcctaaggaaagatgaaatcctgagtgaccttccacctccccttccttctctcaggctttttcttggtggttcaaccccttgcatctgcccagtcacactttccctgttcagccacgcttgcagtagctgtgaacctgtttattccccctagcctggatcttccctagtgttccccagggatataccctcattcaccttttcctctaacctcagcaaagcttcccctcaacccccagcccaactgaagtttgccttcactccttcatacacatttgtcattcattctttcaatacacatgtacgttagtgcacaggataagtgatggggaggaagagacagtccctgctccaaggaagcccagcctatttattgggaatcagtgatccataaagtggctaccacaatgcagggtgacaaataaatgcactggtgagaaggaatgtcctacatgctacaaggagggcatgtgcaccagccttggggggtggcttctctactttctgggagatttttacagctctatcttccaaacctcctactaaatttttgatgtcatcaattacatttttaatttcaagtatcctttcttgttctctgattattcttttttcatagtggttcttaaaagatgtataggaatcagaaatgtacatttaaaccaggacagattctaacaacctggacaggaaacctagttatgaatatcccagtctctcggggtcaggttctctgtaagatccaagagacaggtggccaagctaataaatggagtcattcatttctcactggttgcatcaatattatcgttgtctgttatgttccaagttatggtttggagtggtgagggccatggtctgtgctttcaagaattcacagacaagtagaagagagcagcacataaacaaacaatgactctaccaaagggtgaactccacagacatcggtgtatggattgctcaggaaacggttggggagaacactaggaaggagggagagggccacagaggtgatgtttttgctgagtcttaaaggataaaagcaaattcaccaggcagagaaggggcagaggaagtggcaaaggaggagcaacattcctggcagagagaaaggcatgcgttcaatcagagagagattaaagagcttatagcatgtttgagatgggatgagaagttctgtggctggaatttaatgttcactgagtaaggggagatgggggagagccgactggcaggagatgcggctcaagagcggttggttagtctggattgtgtagggcctcacctgtcatgttaaggattagggttttgtgtttgtggttcttaaacacttaacatatacccttttgaaaatgtgatgaaaattatggatcttctcatccaaaataggcacatacacacaaagtttcagggcttgaagaatccgaagcccattcctctgctctgctcagtcagcagagaaacctctgaaagtttttaagcaggaatatcatgttcagatagaggattgagctcttccacatccagctgtatgtggctatagagtcatttctggtgcaagcatcacgtgcctgcagtccgcctctagtttcatctgcatttgtggtggacagttctgtacaagtgctgactcatctttcaactggcagtcctagctctcttgacctaggcacaggctcagtcccagggcagccctcggccaatggacccgggggtgggggagtcagtaaataaacagcgcagcctcctttctccaagccattattcctccaaccactcctatcttctagaatattcttaactctctcataagctgataggtcccatcctattctttttttaatccctttttttttaaaaaaaaaaaaagctgcaatctttggtgacttgcaaacagaaaaagagataaatgcttgtatttggttggccattattagctaaacatctgtttaatttttgtatcctacttagaataaaaagtttaaaatatattttaaataaaaacaaatattagaaaccgaaggaaaaattgaaggggttaaaaatgggaaaagattagaaccaggatccccaacattgctccaactgagtttaaaggttgaagaattttaaaaatcactttttattggtcaagtctaatgccagtttcctagggttccatcataaaattctctacataagtcaaaatattcagagtatgtggtatggtccaattttgtgtagaaaagggaaataatactataactttcagttttgaaaaagtatattttccccaggtcccagggttagaaattgtcaaacattcttcaggacttggagaacaaagccttccaagttgactcaggtgtttgttttttcagtggtcaattgatggaaaagaaaattagaaaaacaactgatggctatgactttgacttttctttcaacccatggttgtggcattgtgtagacagaggcagagtttccaaatcccctggcttgcttaaatacaggcataagagaaattggatgtgggtcttgcaagcaggagaatgtgccagaacaaatacaattattgagaagaaatcgagtaatctttctattgcttcttggctctgtgatacaggaaaaccaggctttgtggtctctgagcaggatctccagagagtgtcaagccaggaatctctttggagaggggaaaaatggagaaggaggctagggaggagcagaaaggaaaacacgaatgggaaatataaggaaatttcttaacttaaatttccttaaaggtattatggggtcttattttaccagaacttcccatagaaattcagagttctccctagtagaaagaattctggcactaaggagagtggctgcataaacatcatctaatcagtttgaggtagggattctgttccttcttccatggctcttgaacacattgaaataaccagggctgctttaaaaaagactgatgcatgggtcccacctctagagattctgatttatttagtctggagtgtaacctgggcattgaaattttgaagatcttcctaaagtacggtcaagattgagaatcactgttttttctcattttctcttcgactttactgtgtccacaaatcacccaaggatcctactaagacacagatttgaattcagtaggactagggtagggcccaagaatctgcatttctaacaagcttccagatgatgcgcatgctgtcagtctggggctcacacttggatacgcatagcactagagatctaaggtccttttgaactgttaatgctgtcatactaccaacttgctggatttcatgcctttatatgtcactttatcaaacaactctaagcattatgctgtgagtagctgatggactattatgtagccatgaaacattatgctaatgaagattatatagcgataatgggggaatgcttatgtcatgatgtaaaatgaaaaaaaaacagtggcagaaaaattttatatgatcacaaatatgtcaaagaaaaactgcatagagaaaactgggaagaattatatcaaatgttaataataatcttgaggtgatctttttcttctatttatttttatagttttctagtattccataatgaacaccaattattttcataacaaaatattttcaaaagaaatgcctgaacatctgcaagttgaaataatatagtgcatttaatcctttcatatgtctaattttatgtttatatccatccttattttgtattaacaacaaatacaggtaatttaaatctctccatttagtcaactctagatgagactagagtagctagtaattcacagagcaaaggataaaaccagcctcattgttgtaatttggttctttccatgaaaacactccatctctctgtacaaaatatatcatcattgcttctgttgaataactcagggaatgctgcaaattgtaaatagcaatgtgagacaagggaaagatgcctaggccaactataagaagacctgaattctaattttatcttgccaggtaaccggctacatgaccttgggcctaaattgcttacattcactgaggcctcaatttcacttctataaaatgggtattagtagaaatgcctacttcaaaggtcattatgaagatgaactgagatagcaggcactcactaagtgatgactcaacttctgtaggtcttgattttgctcatcatggaataagagggtagactagaagacctctaaggcaccttcaaactcttactcataaagttggagaactgtacttttgaaagatctgcacaaacaagactacttggaatttctctggatattaaataaacccctaccagttctcagcactaggcagcaaggacaaaaagtcagagtcaaataaattcaatataacatgatagatatgtgccataatgggaatagataaaaagtgctataagagtccaaaagtagctgtagttgagctagtgataatgtggggtttgaaagcaaaggggaggaaaaggaattcaggcaaagggacacacaggtgcaatggcttggaagcatgaaagaaaaccgtggtgtgactggaaagtatataggaaggagagtggagacgaaaccagaattgagacagtttatggaggacctttttggccaaaatgaggagtttctaatttaatctttgaaccagagagtaatataatcagattcatgattttaaaatgaactgtgacagctgtgagaaaggtaatgtggagaaagagaggcaagttgggaggttatgacaataatctaggcattggtgacaaagaaacacaaacaggtgtattcaagagactgatgggtcttaatgattgtttgcatgtgtgggtgtggtgagggaataaggagaggaggaattcaaagatgcctgtgacccagatagaaaatgcaagagatggagcagtatcggggtaagaggtgctaatatgttcaatttgtaggtgaagaatccaagaagacagattgagcagatttgtggatatgtgtacttctaaatccggagggagagatattatggagtctgtgtgagtggtaaagtaatgaatggatcaatgtgtatctgaaaacaccagcaatgttagaggtttccaaggcagcgcaactccaaatgtaatccaaggacagttttgtcagcatcatagctccccggtgctgggcttgattcaaggcccactgagacagcatatgcagcctgaaagatgagcatttacatcttaacaagtccctctttgctctaagaaaaagagccctttgaaaaactgatggaagctgtagacccagtaccattcaacagaaatacaatgtgagccacatatgtaattttagtggccatattttttaaagtaaaaatatatagatgaaattaatattaacaatatattttatttagcccaatacagatattatttcaatattaatcaatacaataattattaatgatatattttatatatttttatcactatcgctcaaaatccagtgtgaatttcacacgtaccacacacctcaattgaagctaccacgtatcaaacactcaatagccacatgcagtagtgaccattacataggacagtgcagctacaggcacttcccactcttctgcctgaaaaatacacatgcacacaaaatgttcaagaattctggggattctcatagctcatgaaacacatctgcgcttggttaagaactctttttttctaggaactttgggttggttggtttttttgtttttttgttttttttgcctgattctagaaataggtgacttttcttcaatgttgcaaggcttaagtattctagtcacatggaatacagggtaacatacaccgtagaatgagaattcaatcttacgaaacaaagattgtctttttgtttcataattctacagtggactgtctactctaaaagatagattcttatattttcaccggtcacactattggttgcagacttggtttattaactctgtaattattgtttctaggctaaacagaaacaaagagttatatgcaatattttctgggtggataattttaaacaggattttcaattcagtgaatttttaattgttttttgtggtctcttttccccatgtattggttatatacacatttcagagaaatatcctgaggcactaccatcttcaaactcccatgtatggttcctttaaagcagcaccctcttaaagaatacttttttctggatctcaggcagaattatttttagaagcagcatcatgttatagttgaaagaatgacccttcctttaattggactgctgggatgatttggttgtggtctcacataattatagacctgtgacaacaatctaagggccatcagcatacttccaatgcctctaaatcaagggtctgtggttaattgctcacaggtgttttcttgtgcttatgaatacatgcagtctatgagttatacaaaacttggcagaaagagaggccataaggttgaggagtttcttagatttactcagctaattaatcaggcagagtagggatttgactactccactgaaggggctaagcatttagagtatgactgaggagtaacctgtactgtatttttaaaggagagtttaagaggaaaataaaaggaaacaaaaacttttagcagctgctgccactaaaagctcagtatagtagtccagcctgttctagctgctctgcagaggtaggtcagcactgcctagctgcaaagaaatggtgttggattctaaaataaagcattgactgtgttaggatatgaattttaatttctaaaactgtatattaagagacaagccacattgttgatccttatttcttctattactaatcattattgtcggagttatggccttagaaagtatggagatgctaatgagaagattcatgtattagatttgtttataaattcatcctaagcaagtaaacatgacattattctgtggcataatataaaaccccaaataatgtcccaagaattgccccaggtaacttctctagcagttatccatgaaaataaaagcacaggggcctgcaggaatgaaaatcactcacagccagttagaccacatcattctgcccaagaagctaggtggaaaattgttttacattcacttcgacaagcatatggtgagccaggtactgctgtaacaaaggtgaaaatgacatggttcctgccctcaaggagctgatatttgaaaggagaggaggggaaaaacaaaggaagaacctcacttgaaaataatgtacaggagagtcatgatccacccagtgaattctagaaacatttcatggaggatgtagcaactgagtcaagttataaaagattagttagctaagaaagtgtggtattccaaggagaatataaccagagcacaaagaattatgtgggaagtagttacatgtggaactagagatacaggtagaggtgatgagttccaaagatacctttctaaagatgcaggagacttaagcttgcctataatctgaaaggaaagatctagttgaaaggaagagattagatcttggaagatatgggtataaaggccatagtttgaagtgttatcctgaaatagaaagaaggacataccaacctctaagactgagggaaggacagcaggttgggggtggatgtagaaaggcgcatgagaggataggaagttgagatgtctgtagttgacagccttccattttctgatgaagtgggaggtgatgttattagcttaaagcaatggctctaatcctcggctgtacacttaccggggttatctagggagctttaaaaaagtactgatgcttggatccagtgccagtgaatacaatttaagtgttctaagatgcagcctaggcactgggatttttaacaggtcctggagtgactgtaatgggttgcccatgttgagaactactggcttagactagattaaagggtttggaacagctgtggaggggaatggacaagggagctgaagataagccacacagctgtgaggcggtcttaaagatcaggtgaatcataaatgtctgagagtcccaatctgcaagggatgctccttttttcctcctcagcagcagtgttatgctggtgaaggaagctggttttggggctgatcctaaggtggggtttactggcctggggtggtaaagaacacaggctcaagggaactgaggcatgagagagggctccagccatttttatgcattctaggctgagcctggaagaaaacaagacaagaagcagcccatccagttccaccataatcctatatttctgctaatggaagttctaatgaacaggaacatgagccaaaaaacaaactagtaaacaagccacttggagaagcaaaggaaccagatattccaccacctatgtaattagctgagtaacctagaggtgactttgtgtgcatgcttactatgaatacgtgtgacattacatgtcaagaactgcattttatacacttccctttttgaaactcacctcatatgcccatgaaacaaaaagccagtatatggtttaagatgggtatagctttcccgtttgtcatacaaagcttctattaaagcatcaggagtgccatgtggaagcccccttattttccgtagggacaggcagtgttgctcttgctaaggcagtgacctattattgaaccgttttgcatgtaacacagtgagtcattgttctggcagaattccctgctctccacacacatttttacctacctttggaatgtgggaacactgaccttgtatatgatagcctggcaaaaaagtggctctgtcagagattttactactgaacagcagggagtggggggaaaaagaagaaaagggaagagagaaggcagagagagcaagggctggagaggtagagggaagacagggaatgatgaccaagaggaaccagaaatcattcttccagatgcagtgttgctcataatggaaaacctgattgagaaaagctcagtatgttagaattgcttgtcagtgagataacgaacatgaatgtgggcctattatgtaacatatatttaatatgatatattgctgcacatatatgtttgagaccttgggcaaattacctaactagtttgtacttccatttccttatctgtaagaaaaggatggttataatgctacctacctcgtagggttgttgaagggattaaatgagttaatgttattggaacactcttgcatatattaagagaacaataaattttaatcattataattattattattttctatgaattagtcagctctgaactcaaggaacttaaaccacctttcctaacttatttttcttctttaaacctgtttcactatctgtagaagggggataaaatcatctggtcaatatgtaccttaatttaggggtattagaacactcatgcactttaaaataaaacatgcaatagataaatgcatggcaataatgatccatttacttgcaagtgtttaatgaaaatttattatatacctgcacggagccagaacatatgtgatatctgccctcatggagcttacagtctatgagtgaagttaggcattatatatatggaattatatatcatatatactaatgcagattgtggtgagggttttgaaagagaagaaccaggtgttatctgtgagaataacaattactttctctgggtacgctgcattacttgccttagtctgggtgtaaaactttttagaagactgacattttattaaggcccaaggatgaaaagaaactggtcagggtctagggcagggttcagaggagggagaggaaggaaatgtttcagatcactttcaataccaaaagaaatccaaggcaactagagtgtagagagccaagggaaaagcggcaagagatctagacctatgttaaggaagtggagacaagagcacagcttgctcatattcgttaaaaggtcattctggttgctttgagcagaacagactggagagaagcaagtatggcaggagcgagacctgttgcgagactactgatgagtggtccagcaaagaaatgatggtggcttgggaagcctggagtaaatggagttaggagggaaataggcagagtcaaaatatatttttgaagtgaaataacaggacttgctgataggttgaatgtgaaggctgagggctgagaggtatcaagaatgactcccagttttccagcctcaggggttgggtagatggagtagcccctggctaaaatgaggaatctataggagaaacaggtttgggtgggaagatgattacttgtgatttgctttcagaatcattcaattgaaatggaaattattttaatccattgcattcagtaaattattataatacaattataaatgtatttctatgaagaattgacagtttcatctgatgatgaatatatattattatatatgatatattatttcatatataattacatatattatatatgtaataataaagaagtccagatgattcttggtttctatatgtttaaagaatttcaaataatttgttgtaagacaaaaaatataatcaatcattgggtgatttagaattcccttaactgtgattttggcactacttcaaataattgctttgcacataacagaagtgtttcatgacataagttttatacaaaaatgtcctggtcttgattcagtaaagcgcaagtcttcttgtatttacatgaaaacatgaatatacatagtatctatacagaagctgaacaatatgaagaaacacttatttttaatacatgtacaggaggccagagttcaacaattgcccaatggatacagtatcacttacacaaagacttctgtggatgtctgtttattaagttaaatagcatagctgggctttaaggtatgcaagaggaggaggataaagaaaaaaaaaaaagaggaaaggaaaagaagaagaaaggtcctggctttcacctttaacggatccgaggtcagcacgtaaacaaatagttaccctttggaagagttgtcataaatatgaccaagaagatttcttcccaaataccccataaaacaaaccttcctacatcaccacctcacagaagcttccctgatgactctgaaagtaccagagacagatgagaaaccgtagactactccacactaagagcataaaggctttttgctagtggacagtgtattactggaacctaggacccagctctgtccagatgtttagggagttttgtgccttctagcagctcgtccatggtacttaccaaaatgaggtcagctactttgtatgctttttggaatatctgacatatctcaacagctggattccatatgttttctttaggggtataatattactccatgagaaaaaaaagttagaagttgaaaagaaaagatgaacttgacaataacagacaaggcctttccttatgacagctgtattcaaggtgtcgcagaaggcaacggggtaattcccctgtagtctacagagccacccataccttgttactttcagaggtgaccagcaaatagcggtgagataggacaagttaattcacctttatgagccccaagtgcctagtttgtaaaatgaggtgactaaactaaaggtctatgtgagatttcttccaggtctgtccttctactactttgacttaccaccctgggaatgctgtgctcaggtgccatgggaattggcttgacttgctctgtggaggccatccaaacctgatttccacttagtttggtctgtgaattctacttttaaattggcctgggaatgtctcctctagaatttacaactggatgaaagaaatccatcaagggcagctaattagcacaaatacagctgccagcagtaactcatgaaggaaattctgtagggatgaaggaaaaagattccgcaaaaccacaaggaaagttccactgatttggcgcatggttggggattgggcaccaggatgaagggcagaggggtgatgactgagtcctcaccgagaaaggtatgattccaaagtggaaaaggataaatgggcccctgtgtccttttatgtagaacaaagttagactacaccagtcagacgtttgcttgggcccattacgacagtgcttccagagctagaagccaaaaaccatcatctcttgacccctaggaatgtcacctttcccaagaagtcttgtccactccaccagcctttctctggatggatgtctttggcttgttgagcagtggcagtccagccccagcaggacctggtaagacatgacaatgcacagacccaaaccactgacactcctatgggcctcagctgtttccaagggctctcactgcaagctgctatgggccaaggtccccaagccctgctgcagacatatcattggttacaagctggcaccagccttagagtgctaggcagtgcaccacacttgtcttcaagttctgatgttcccagagacagttctcaagtaggaagtagtaaattcagggagaagcatccaggccagctgatttgccagagtttgctgatagaatcaactttgtttgctgcagtggggctttcacatcactacattccagggctgatgtataattaccttaaacacagagtggcatttaaccacgccactgtttatgtgcccaaatcagcactcagaggaagctgccttttaaacttcaatttttttttttaatgataccttgacattgcatgtgactttggctgggaaaataagcctggttgtttgtgcttgatgttataactcaaaggctcagaagtggtggagttggatccagcagccaacccacaatagagctgtcttgacatcctcactggtccagccatgcaaaccagcttctcgtggggatggagcttttcggcttagcttttctgcctttctcttatagtgatgaactgacacagtgtgaccaccaagggcaagttattgcccagatatacttccttagctccaccatcacattcagatgcaatcagcaacccaaggacaggtagccagaagatctttttaactaggcctgaatgtcctgctgttccaccctgtaggttgttcgagaagatgggtggatcttcatgaaagcataacagagaggacaacatttactggattagatggtattgcttacagattcttgcatctctaaatgacaggtgctgtacacaccaacgactaattttttttaagtctaatttatatgataccaacacaatacctttaaagaagacagaaaaacacaacagaacagaaccttccttgcaacccactgtaagtaggtcaatgtgattacccctactttaagattgagaaacagattctaccagacccagctgggtcagaaagccagtgagggtactaaaattataactgaaactccccatctggccccagcttgtgtggtcacagaggggaccagcataaataggtgaccatatcatttatcatgcaaacaaggactgtttttagaaagggaattattaaaatgtagacaagagcaacaggcataacccgagactgttctggcaaaccaggacttttatccaagctatcttcctgcagccttcatcagtgataccacatctgggtgaaggaggaagctgatggagtctaagcttcaggtccctcacttgcacagatccctgtgagtgctgggagtggctaagacttgtaggatgttgtctgtgcagaacaaaagccagattccaataaggaagtgtttctatgtaagaacatcttgtaactcagctaaagatattttaggagtcccaaatttccaatccttcagcaacctgttgtgatttctttccttgctctaaataattattcatttttatacctaattttgcatatataatttgcacgaacagggtgcaaatcaggctatttctgaccctcactatatttataccagtgaaattaggataaaatggtcactaaaggtagctctagagaaggagctgagggtcacctataaaagaagtgaggcagaagcagtcctgactcctagtccttggttataggaggaactaaagaagaaaaaggttcattgtatgtttgtgagcttcaagttctttcatagtaccaactggtagagttatttcctgccctagagcttcactcggagtcaatccctaaccaacccccaacacacatacagagtgcctgctgaagtcagattccagagcatttactcttattcctagtatcctaaagattcatcccaaaccaagcttttgggagtccttcaatctaattctttctctgcactgacgcattgtgtggctttgtttttgttttttgagacagggtcttacactgtcacccaggctagagtgcagtggcacagtcttggctcactgcagcttcaatcttcaggactcaagcgatcgtcccatctcagcctcctaaatagctgggactacaggcaggcatcatcaagctcggctaattttttaaaagattttttgtagagatggggtcttgccgtgtttcccagactggtctcgaactcctaggctcaagtgattacaggcttgtgccaccatgcccagtcatggcttcgtcatttgtcataagatcctctgttttcttggatgtacaataaaaacaaataatacttgctcctccaaaaaaaataagagatctaattttagaatcaactggcctctgcacacacgttagagcaacaccttaggtatatggaatgtgagaaaggaataggtggttgttaaaacaaaacaaaataaaaataatcttggtggaattcttgatcatatgttaagaaatgaaatgagattatcgcattggagaatctcctcctcaatgagttttacattttgaaccagcctgtcattatatttcctgactggtaatcaaagaagtggcctttaaaatgggatcctgaatgccacagatccaaatgattagattatgaaacctagacctctggttggtcactctgaaagctgtaattctgcaaattactcagctgtcttccaggtctgttacctttcatatttttgaaaggacacacagattttctcatgcttctctgtgtttggacatgctgtttctccaagtagaaagccactttacatctcaacctggatggctcctcatcatccttcaaagttttcccagatatcacagtttcctggaagacctttctaaccactgctgcccccctctcaccattcacgccttgttccattagcactattggtatcacagtactctaccatgtgttagtgagttttattggcccatctcccaccactcaactatgaacaatctgagtgtaaagcttgtgtttactatagttgtagtagacattcaatacatgttgaataaattgaagaaatgaatgaaagcaaaaagatgctgtatgtcaattataaggcaagaactgtggtttagtagccctggaaatagagtcaaagaattttctgtgaatgtggtacatatacatggaatactatgcagccgtaaaaaggaaaaagatcatgtcctttgcagggacatggatggatctggaggtcgtcatccttagcaaactaatgcaggaacagaacaccaaataccgcatgttctcacttacaattgggagataaataatgagaacacatggacacacacggggaacaacacactggggcctaccagagggcaggggatgggaggagggagaggatcagtaaaaataattaatggatactaggcttaatacctgctgggtggaaaaatctgcaaaatgaaccccctttacaaatgcttacctatgtaacaaaccttcacatccagcacatgtacccctgaacttaaaagttaaaataaataaaattgcagagaattttatctgaaacttaccctgttgtttcctagcttagacactgtagcccaaactgggaacaacatgtgaaaagtactattcaaaaattagataaaggcagattccaagggtctgggcaatcctgagtgaaatattaaaaggataaattgcactcttcaatttctgaactatccccttctttcttcctggcttttaatactgctgacttcctaaaaacaagatgaatgtgtagggtgcatggtatgagcgtgtgatctcattgtggaatttctatatctagcccattgctatcttttataaaatggcctctgtaaggctctgcttagcgagtggacaagagtgtcatctggagctccttcatttctggcccctgaagctcagagggatgtttttcacttacccttctaaactgcagcgctgagatagctaaacaccagcaccaaattttttatgctcagcaagttagtaaaatgagttttcttaagtccaaatcagagctgagagaggttggaaaaatgtgtctggaagagtaacttgcctgcttaaaactcactaaaataactgttcaccccaatcttgtacaaattaaaaaactgtgtaattaaacaccctgggaaaatgtcaagttgtccaggtagaagaaaaattgtaatgataatgaaagttatattgtatctagaaaccatacttgaagactgcacagttaacactctgtttcctattatgctaaaaggtggcaaaattatcataatttcaaaacaacataatttactgcccactttgtcttcagcatagtatgagccagaagggagtgaaacagggcagtttgggggcaccttcatgacctaaatctccattttgaatacttggcatattacttccagcaatctgcatatttagaatgggatgaatttgtgtgtgtgttggaggtggtagtggtgttggaggaggtggtggttatatatttttcttacttagcagaaactaattcagaagaggtccgataatttctactgttgcattttcagaaaatagatgatgaaactgaaaacagaacccaggaataaattcagatttctaagcctatatttgtcccatggcccttttgggattccccttatcttttttttttgttgttgttgttaatgatggtgaaaaaaacagacatatttctacccacagcaggaagcagtacctggataacttttccctggaccctgactggaactgatttttgttagtatcacagtgagctgctgtaagataaattgatagagccttcaaatctttctgctcccgagcacaaaccccatcattctaaccaggtcctcattgatctctgatccaacacgctcattccaagctggaggtctttgtagaatgttcttccctctcttctctgcttatccaaaccttgccttattttaggtccacctagatctcacatcatttgaggaagctttccctattctcctcagctcatgttaactgtgcccctctctagattcccctagcatttactgtctgaatcattctttttagaacttagtactccaccacgtgttagggagttttattgacctgtctgtctcccccgaccagactatgaataatctaagtgtaaagcttgtgtttactatagttgtagtagacgctcaataaatgttgaataaattgaacaaatgaatgaaagtaagaagatgctgtatgtcaattgtaaggcaagaactgtggtttagtggccctggaaatagagtcatagaattttctatgaaggtggtacatacacaccatagaatactatgcagccataaaaggaacacgaccacatcctttgcagggacatggatggagctggaggccatgatccatagcaaactattccattctccttttctctttactgaattttgagatccagaagaacaaggtccatgtcttattttggaggggttgtcatttcctaggttccagctaggcattaaataggcaagataaatatttgttcaagaagccaaaaagtcatctaattcttggtggtactccaaggtttgatgaagagcatgatagcatgagggaaagcacgtggattttgagtcagacagaattttctagtttcccttggccccagttatgttttttgttttctgctcttttttcttgtaaataggaataagaatacctactttgccacgttatcagggttaaaaataataaatgtgaaatcccaaatacagtgccttctatatagcaggctctcaataaacagaagttgctatttaactaagggtgagcatttttgaagaatatttattatcatgaggtctagttagacccatggagtagggattgaggacactgggtttggagtctgaaagacctgggcttgaatcctggctgtgctacttatcaactgccactttgaacagagacctctttacgtcttttctcatctacaaaatagagataactattgtacctacttcagagtcattgtgaagattaaataaggtgtctggaacatcacaagtactcaataattattagctataatttgtaaagtacaataagcttcagggaaaaaagaaatctatgtaattctaactccaaattattcaactggcagataggcctgagagagcatttgcagttttaaggaggttttaaaactactttcacttttaaaatgtaccacatgcctaatgatctgatatttagtcgattcacacaatttctgatttttttatatgcctttagaactgcaaccaccactattacaagtgtattatatttatctgcatgagatagtgaattctccctctttataatcttattctgatgtactgtgactggatgaagttgaaagggagcatgattaaaatatcaagccctgcactagccaaacttccctattctttgagatcctaaaccacacttattttcttcaataacataaattgcaaattgataatctcaacttcttatgtatgtttgtggatgagattagaaaggcattttataagtgactgaaaaataatgattgaaagataaggttttccttggcttgaaatgttgcatatagggattatgccatgtcagaagaaggtctagccagagaggacaccctggtgtacaggtgactgagggaccaagagatgaagcagcacagcccagaggagaccagaaatcaacacaaaacaggagtgggagagcactgggcagagataggctgctgggccaagacaggaaatggcagaatggacatattgggtgctggttcttgaaagatcaaacaaagcaagcacactccatttccattcctgatgcttgagaacagaagcagcttctggcctgtgatcatctccctgtgctctctctttggctctcctgttacccgacctgcttctccccttcactcactgctccatgccttacccaattagaaagttggagcactggggatgtttaccatcagagtcacaggacagtgaatagtcatccctccatatccttgggggattggttccaggctctcccctctctcctgcaactgcagatccaccggtgctcaagttcctgatataaaatggtatagcatttacgtgtaacctacacacatcttcctcatatattttcaatcatcactagattactcataatacttaataaagcataaatgttatgtaagtagttcttaaactacattgtttaggaaataatgacaaggaaaaaagtctacatgttcagtatagatgcaattttttttccaaacatttttcatctgtagtaagttgaatccacagatgcagaatccatgcatatggagatctcactgtatttgagctaaaaaaacagatatgtgcctatttctaagagtacaatctatgatattctccagtctctgaatgctacttttaatatgaagatcactttatgaattatataacaataaatattctttaacaacttgaggtataattgacatactataaaatttatccatcttacatgtataatttaatgactttttagtacccttttagagttgtgtaatgatcaccacaatccagtttgagaacatttccaacattcccaaaataactctcatgcctgtttcaatcaatccccattccaatccccagccaaccattaatgtactttctgtctctatagattttaaatttaaatggcttggatgtgatggctcacgtctataatcctgtaatcccagcactttgggaggccaaggtggacagatcacttgaggccaggagttcaagaccagccaggccaacatggtgaaatgccatctctactaaaagtacaaaaattagctgggcatggtggcatgcccatgctcgggtggctgaggcagcagaatcacttgaacccaggtggcagaggttgcagtgagccgagatcatgccactccactccagcctgggtgacagagcaagactctgtctcaaaaaaaaaaaaaaaaaaaaaaaaggcaacatacacatacactatgccttttgcatctacctttttcttttcttttctttttttttttttttttgagacggagtctcgctccgttttccaggctggagtgcagtgacgcaatctcggctcactgcaagctccgcctcccgggttcacgccattctcctgcctcagcctcccgagtagctgggactacagacgcccgccaccacgcccggctaattttttgtatttttagtagagacggggtttcaccgtgttagccaggatggtctcgatttcctcctgatcttgtgatccgcccgcctcgccctcccaaagtgctgggattacaggcgtgagccaccgcgcccagccacatctccctttttcacttggcataacggttttgaagttcatccacgttgttgcacatatcaatagtttgttcctttttactgctgaacagtccatgcaccaattgaaggacatttgtttccaactgctattatgaataatgctgctatgaacattcacatacatgtcttggtgccaatgtatgtttcatttctgttgggtaattcctaagagcaaaattcctaggtaatattgtaggtctaactttttaagaaactaccaaattgtcttctaaaataaaatatattttacattcctaccagcagtgtatgggggttccagttgttccacatccttgtcaacacttcttattgtctgtctctttaattatactcattaaatgggaacataagcattctacggtgactagagtctacttttcaatttgtaacagaccctttgatgtctttagaagcagaaagggatgcttagtttcttgtgttagttaaataattataataaataaaaaagaaacctggcacttgatatgggcaggcacccaggctctgtgctgactagcagttttctttcagccagctggccagttgctactagttagtgatatgtaacctggtaaagccacataattgcttcaagcctcagtttttttcatctataaaataagaacactggattaaattatctatatgtttccttccagctctaaaacaaggagtcaattctgattattcttctcccagaggctactggttgttaagctgctgttgctgctttctttttttcaaatgagacagggccttgctatgttgcttaggctggtctcgaactcctgagctcaaacttctcctctgctccagcatattgaagtagattcctttagttatctaagcctctcatggcctatgatattatttcaaagaaaaaccagcaaaatcaagaaagcctttattctttattttcttctcaaaatgatgggattggctactaagttatatttgcagaggaaaagagaggaaagcaaagaacccaacatttgttgactgcccatatactagatatgaaataaacattttcatagttttaatatcataaaactcataatccctgagatagttctataatcgtcattttacaggtaaagaagcacaggcacagagtgtaggcaaattgcataatgttacacagatagtgagtgaagctgggattcaagcccatgtcatctagttcgaagttggattttatttcattatgccaactgagaattaaaaaaacaaagaagaaacattttaggttgagtgcagtggctcatgcctgaaatgccagcactttgggaagccaaagtcaggggactgcttgaggccaggcatttgagaccagcctgggcaaaaaagaccctgtctccacaagaaaataaaaaaagtagccaggcatggtggcatgcgcctgtagtcccagctacttgggaggctgaggtgggaggatcatttgagcccaggaggtcaaggctgcagtcagccatgactgcaccactgcactccagcctaggtgcaaaatgagatcctgtctctaaaaaaatacataaataaataagccttaatgagcaggtggaagaaagtgcatgtaaatgtcaactaatgagaaaatgtaacaatgggattttacaatggccaattattacacctaaattatacagccaacaattatcttgtagtacaaggcttccactcatttccacactctgctgccatatgtatatgcatacttcaaaccctgaggaccaagagtcaaattggcagtttcagaaggaatgtagaggagtgggattcctgcttattgaaaaggcattttaattttctcccaccaagaaaggattgctcattctgagtacttgcccagatagtgcagagaaaatccacagagacagttttgctacccaaggtgagaaactgagaagttccagaattaaactggtacattttttgagtaatagttctgcttctcttgggtaagacgaatctttactgatgtcattgccacccaccaccacctggtatctctgcatggtggaagccagagcaatatatagaaggaacggagcacttacaagaagttacagggcacttggaggaattctctcaaagaaacacattcacagattccacagtgaatgcctccttaatctctgtctttaggaacatttgatttatgtgtctcacactccattttttttggtaaatgtttatatggtcatcgaaagaggaaaaagtaatactttttatctttagaatgtctactttcattagttctgttccttctagaatcaagctaaggaagctaagggttgttcatgcttaggtagagaaggtggtaaaagggacagagaatgggaggtgcaaatacgaataatatgctgtgaaatcactttttctctttaccattgtcagcacagcttctggtaattggggattatttgaatttttaacaactcaaataagactcaagtaagattttaagtcttcaaattttagggctttaaatgcaatcctaactctggcagtagattttactcagctcgtatcatgtatttaatatcagttatctttgaatgggaataaaaatactagttaacaccacagggtctaagagtgagagtgaaaattagcaaaagtgactacatggtgttttgtcgcaacaaattctgattggtgtccctaagaaaagcagtaataacattagcatagatcgatgttcttcccaaactatgctccaagtgatatgatttggctgtgtccccacccaaatctcatcttgaattgtagttcccataatctccacatgtggagggagggacctggtgggaggaaatagaatcacagaggtggtttccctcacactattcttgtgctagtgagttctcaagagatctgatggttttatccccctttgcttggttctcatgcttctcctttctgccaccctgtgaagaaggatgtgtttgcttccccttctgccatgattctaagtttcctgaggcctccccagccatgctgaactttgagttaattagacctctttcctttataaattacccagtcttgggaacatccttatagcagcgtgagaatgaagtaatacacaagagatattaattaaggtgatctgctggggacagaacacaactccataataaaatacgcttaggaaacacgagtaaaatttctttgtggaactccaaagagtctttaatacagtatattcaatgtgcattatgagcctccaaaagagagatgctgtgtgttgtaccacttgagctgcttgaaaagaaaaacttaatctcagaaatcttttttaaaacattttggggaaagatggcccagaaaaggcatagttcctttagaaggatggtttcctggctatctgcagttctctccatctcacccctctccatctcacacccatcctgtctttctaagatctccaaaaagaatgtggtctgataaatccatagaggatggaaatatattgaaagaagaatgtccatggccctttctttctacatctgaattgtcttagagaagcctagagggccagcctgattgagacactggttaatggcagtttcaggtaaaaggggaattcttctttaaaaaacaaaactaacttgcacaataactaaagggaaggcatggaacttgtttggacctgaattccaacaagccaactgtaagatgacattttggggacatggaaattttaaatgctaagaaattattattaaatttgttaggtgtgattatggtatctggttatataacaaaatggcatttttaagaggcaaactcatgcatttcgtgtaaaatatcaagatgtctagaatttgctttaaaatatctaaaaaaatagatgtagcaaataaagcaaatgttaataactgttcaatctaatgggatatgtgaggattttttttaacaagtctttttatagtttcaaattttacatgatgaaaagttttttaaatacagatttcttagccccaaatctaccaaatcaaactctctggagattaagcctaggagtttgttattatttacctcctcttttttttttttattttttaaaatcatattatcagggtttttttggctgggtgcggtagctcatgcctgtagtcccagcactttgggaggcccaggtgggcaaatctcttgagcccaggagttcaagaccagcctgggcagcatggtgaaaccctgtctctacaaaaaatgcaaaaattagttgggcatggtgactcatgcctgtggtcccagctcttgaaaggctgagaaacgaggatcacctgagcccaggaggtggagactgcagtgagctaagatcatgccactgcactccagcttgagcaacagaacaagaccctgtcaaaaaaaaaaaaaaaaaaaaaaagaaataattatatgtcatagtttaaggtaaccataaaattgtaataaaaagcagtgttttgttttagaaacaagatattttcaagaaaagaatacaaataataactctaatcaatttctaacatgtatacccaaatataagttccttagagtggaactgtttgtgattagcataataaagttacgtacaatacttcacatactaaattactatcaaatttcagcagtgacaatttgatgtatcttttaaataatgcagcgattaacacagaaattcagtacatgcagaatccatgctattaatccatttcttcggtactttcaaaaatctgaatcatatttttaaaatgtgatggcaggtttacagaacatgcctgtgcatcatgcatgtagttcagacagtctgcaaaaagcagatcaacgacatgattagccatgtcctaagatacaacgtccacaaatatggatttgtgaactatcttttttctacattgaaatgactatataactacatcttcatacactgaagtgtatataattgtttttttaagtgcttgtctgttatcacctaaaatcatgtggcatacaataagtagtactcttattacacgttgggagatagtaacctaatttaagaccagcaagaatacatcagattctttgctaatagggaaggaaggaaaaaattattcctcaagggaaagaactttgccatatttgtatgacttgtacctagcacagtgtctaaaataggcatgcaatacatgtctgcgtgaattaatgaatgaatgcttatcctctctccgaattatctctatcccctattcccaaaaccaattatttgttaagatgaaggctttgatgaaagctcttagtccatgaaaattaaattgctgagtctgacccctttgtaggaaatgtaaaatcatgaaattcaagtactcttgggaaatccaaacaaattttcatttaccaatgtctataaaaaaggaaaaaaaaaagataaatttactaaaatacataaatgttagcttttgacattttttaaaacactggaaaaggaaatagaaaattccctctcacaaatttggaggcagcctagttagtataacttcgagaatgcagtcagaaaggccaggcttgaactctggccctgccactagttagtgatatgtaccctggtaaagccacataactgcttcaagcttcagttttttcatctataaaatgaaaacgttagattaaattatctatatattttttccaggtctaaaatagagtcaattttctggttattcttctaccagaggctactgaccggtgcttggttgttaagctgctgctttttttctttttttcaaatgagacagggtctcagtatattgcccaggctggtcccgaactcctgggctccagtggtcctcctgcctcagcctcccgagtaaggcttcaacttctttaccagtattaagcaggcagagacctggtactgtggttcacacctgtaattccagcactttgggaggctgaggtacagaggtcagttgaggccaggagtttgagaacagcctgggaaacacagtgagactccatcttcaattcaattcaaataaataaataagcaagcaagctgggcatattagcgtgtgcctgtgatcccagccactctggagactgaggcaagaggatcgtttgacctaggagtttaagtctgcagtaagctatgattgtggcactgcactgcactccagcaggaccctatctttttaaaacaaaacaaaacaaaaaggaggcagagtctagctgtgtgcttttcagggacccaatgccattctgaattacaggagcccaagtactggcaaacacaatcttcagcatatcagtaaaagcccttggttatccaattttttaaaaagtagatttagaaaataattttaagtgctctcatttagtttaacgttttaagtaaattttaccataaggcagattatttagcttttgagaacacattctctgcagtcagactgggttgaaatctagctttagaactcaggacaaaggacttctgtgtgtctcctattacctcatatttttaaaagtgataaataaataatgccatctgcttcacagatttgttgggaggtagaataaaaaaatacttgcaaagtactctcttaagtagaatacctgacatgtagtaatcactcagtaaagcagctataatttatcttttccatcgaggctttatgtagaaaaacactcctattttcctgctaaagaacacaataaaacaatcccgtagtgtacacctagctctttactccgtcctatatatgctcacatttgcagcatgagtgagttatgcagtggacaggtctatacaaacctactcccaaagtccgagaaagcggaaggcaaagaaagaggctgacaaattcagtttcttagggagaaacatttaatagggacttaggagcagaagttgcgtctgtgtcttgggcctcaggtggtggtgagacaagatggtggatccccgccccattactccccggagccagggtttatatagggaaagggtatgcatgattcagatgggatgtgaaggacaattgaggtttgataacatcaaggttgttttgacctaagggcaggatttaaacaaattacaaaagataaactggaaatcttagagtccttcccagaaaaggtttagtcattagtcaacatggcagattagcatccaatggagttgctttagcctttgtgaggaaagctggtggagatcactgcctgactgttggtccatattcctgccgtaaagttctattcctttctgccaataactaaattgcgctggctgggcagctggaggaaaggagccctgtgaaatgctgacttgtgttgaagatggctcaggaagtccctggactccctagcctcctcctgtttttgtgaggcaaatgagataatgctggtggattaaaaactataaaatgctgtccaagtgttagttatcatatgaaaggttaaatttgatgataaagtttagaggggaaaaggccagaatgtgggatgtgaccccttaaaggtcttcgttgttacaaggtaaggtgcttgtttccccggggccacggagttgttgtttataggtccccattaagcactgtgagaggggtgacgtgaggggagaagcagggagcccctttcccaagagggctaagaaagaaaagtaagggtgaggccactgtagagaaaaaagaccagattcattctgaaacattttctcacattaataaacattttaagtaaatagtaattgtaggctgggcacagtggctcatgcctgtaatcccagcactttgggaggttgaggtgggaggatggcttaagcccaggagtttgagaccagtctgggcaacacagggagaccctgtctctacaaataataataattagctgggcatggtggtgtacacctatagttccaactacgtgggaggctgaagtgggaggattgcttgagcctgggaggtcaaggctgcagtgagttgtaatcctgccactgcactccagcctgggtgacggagcgtgaccctgtctcaaaaaagagaaaaaaactgcatttcacatttaaaaaataaatcttcatttttctttaaaataattggcagaaaattctacctaaggaaaggaagaaacattttgaataaaaaccattacatcaaaatccttgaaaaattgattttattctgtaattgatttatgtgctcccatatttagtatgtaaataatgtcaaatatatgtcattcttttattttaggatcacattgttgatacacacaggcacacacacacacacacacacacacacacacacacatatatttggaagtaagaagcatgctaccactggctaggaatagttgggggagggggtaggaaactgacctagagcaaatggcatcttatcagcgcagatacaattagcaacattttactgtaccacacatacttgcaatgcagtgtatctaaaaacaaacttaaaggaaatggagaacagaaaaacattttccccagttaatttctataagtcacaagaaggatttcattataaagtaggaattacaaacagtaggggcaaaaaagtaaggaataaagattaaattcacaaaacaagttggtatctttaccttttcatgactgtgatccataaatccaactaaatcagttttttcaagtccattccaatttaactcatcttctctggatccccctaaaagattttaatggctggcttgtctcgaaactcagggacatttatttgtgagttctccaagatgctgagtaagacggcaatctttaagaaataaagtctgccaagcgtggtggctcacgcctgtaataccagcactttgggaggccaaggtggaaggatggcttcagcccaggagtttgagaccaggaccagcctggacaacacagtgaacccttgtgtctacaaaaatttacaaaattagttgagtgtggttgcataagcctgtagtcgtcactacttggaaggctgaggtggggggatcacgagtccaggagtttgaggttgcagagagctatgatcacaccactgtattccagcctggatgacagagcaagaccttgtcttaaaaaaaaaagtttgccaaattccttccatgggtaataagctgagtgagagcggatagcatagtgccaatccccaatgccagtgcaaacagtaactctgtccctactactccattgagactgggagcctccagatgtgggtggttccgcattgttcacattcctcctggagacacttactgccgggctactgctccgggagccacagctgacagatgagcctcttgttccatgctagattttacaacctggctcccgcaatgatagggactgaaggcaaaggtgattccaggggactgtcagtcagctccccatttgtgacccagattgtccaactttctcctttatactgagtgtatggctcaaatgaagcaattagaaacttgaaggacaaaagctgagttgcagatggaatgtagaggggtgtagcaacctatctgagaactttgatcattcttttttagtctgatcaatttaagacacagtagagcttacactgttggaatggaagaggtgtcatccaacactgccctattgactccttcttgccaaatgacctcacataattccttgtaattatttttaaatgttctacccactagaaatgggctaagaattttgttcccagtccttcctgttccatatacatatctaagtttgaatcagtttgagcagggacatatcttgggttcttctcccggttttctgatacatagtttttgctgtccgaaaatcagccactctctgctaagaaagtggacacttcaagtgtcaggattttttttttttattaaaactaggtgttcccattttttgccacaggacttttcttttcctttgttttttaaaaaattatttacatacttctctgccgagttcacacacaaaaataattattacatcccagcactttgggagactgaggcgggcggatcacgaggtcaggagatcgagaccatgctgaccaacacggtgaaaccctgtctctactaaaaatacaaaaaattagccgggcgtcgtggcaggcgcctgtagtcccagctaatcgggaggctgaggcaggagaatggcgtgaacccggtaggcggagcttgcagcgagctgagattgcgccactgcactccagcctgggtgacagagcaagactccatctcaaaaaaaaaaaataattattattattaaactccactattaataagctactaactttgggtaacttgtctgttttctggtttcattatttgtaaaataggaattatgatggtacctatttcatgatgtgctgttatgactaaattagataataaacctaaacttggcatagcatctaaaacacacagtaaacagtagatgatcagctgtcattattttaaatgattatttcaaatgcgttgcattcctggaaaccacccttttgaacttgtcgttcatagaataaaacagtatctatccatgcaacctcgtatttatctatgagccaaagcccttagtgggtcagtacagtggagatgaaatatgtccctaaatatatgtaaaatatagagatatctattaggcagcatcaaaagagcaagctatgaatgggaaggagtagaaattgggatgcctgtatatcctgttcagtctgtattccattttctttgagctgcccttcagcatatttatggaaatgttaattaagaatatgattcatgtatacattattaggttgatgtagaagcttctggggactagatgcaattatgttattcactaagactggtaggttccagtgctttctttagttgaatgacttcttattgaccaaattaataattacagttttagttattccattaacatcccagaaaattaaaaacaggcagtccttccccaatctgaattagatgcactgacgtcaatgtccttattgtgacaaaaagattactaatcacattttaccacattcctccccctccacgtttttattccttggaaggtaaggatagagttacaatacctaaagcattttggggcttcaaattaaacatttcagaaatattttagatctggcctcttcatttaaaacttgttttagtataagcatcaacagggcaactacctgtatgtcatgaatgggtatcaaaatcatttggatctttttgctgatattttaattggagattcctggccctgtcaccagttcttaaatggtactgatacattgccaagtttggaaaccactgtctaaaagcaatcagctaataagtctaagtggaaatcaggcaatatttgaaaaaggtgcttaatgatcccgtttacaactattcttcttgggttttgtcttcatgagaatttgagtatatttgaattcataattatatattctttattgtaaatgctagtgatatgatgaacaataaaagtataaaaataagaaaatggctttaatccatatgaatctgattggtttgatttatacaaacaattcttgatagccctaataatcatttcaatgtttacttctacatatttggcagtagctatttgtttaaaacacacatagtttcatctattaaatatatttctactaaaccacttaaaaataaaatttagcaaattatttaagtaatgataattttccatggtaagagctaatatccactaacttctggttaaattttggagtttatactttattaacataactttccttttttttttcttttttgacagagtcttgctctgtcacccaggctggagtacagtggcacgatctcagctcactgcaacctccacctcccaggttcaagcaattctcacgcctcagcctcccaagtagctgggattataggcgatgccaccacaccctgctaattttttgtatttatttatttatttagtagagagggggtttccctatgttggccaggctggtcttgaactcctgtcctcaagtgatccattcgccttagcctcccaaagtgctgggattacaggtgtgagccaccatgccctgcctattctcctcctttaagacttaatttttgttcaataaattgattcttcattgctattaagtgaaaagcttaggtttccaacttttttcttttgggtcttcactattgtttaattgggattaagataaatcttatcctacctctgttgagaaagagtctcctatttacctttcccctcaaaatctctacatactaaaaaagaaggtgatctaggacgagataaaatgtgtactgaacgtcttggggctgtgggaagatccaaataaagttaggggaacggtggaggcagaaactgagtccaaatatctcactctttaggtcccaaagacatgatccttcacctccagcaacttttcaatagacacttggcaggctcagccagcatcccccagatactaactgccctgactcacagggcacctcaatgttccagtcaagttcaccctttcgatcagtggctttcaagtcggggcagcaattctttgttgtgaggttctgtcccctgtgttgtaggacgttgagcagcatccctagcctctgcttgctggaagcctacagtagcactgtccctcctccccgctttccccataaagctgtgacaccaaaaatacctccagacattgccaaatgttctcgtaggggcaaaatcaccccctatccaaggaccactagaagtgacaaaatatggctttgaaggttcccttgtctcacgattatctcccaccttacagatgccaaaatttattaataaggccacgtaccttttgtttcacaatcatagacttaaaggcttaaactgtaggtactagtttgaggtgattttggtgggatttcagtgaaagtacaactagtcagtcattaatggcaaagggttggttttcagaacctttctgagtctgctcagaagggaacatagtgagagagagagagggttttcaacatctgaagtgggctactttttagaaaaaggaggccagaggccgggcatggtggctcacgcttgtaatcccagcactttgggaggccaaggtgggggcatcacctgaggtcaggagtttgagaccagcctggccaacattgtgaaaccctgtctctactaataatagaaaaattagtcaggtgtggcagagcacacctgtaatgccagctacttgggagactgaggcagaattgcttgaacccggaggtggaggttgcagtgagccgagatcacgccattgccctccatcctgggcgacaagagagaaactccatctcctaagtaaataaataaataaataatacaaaggaggctagagactaagaacaaacttccaaagcttgattactttacctggaattatttgtccctctgtcaaacatgttcctggtgcctcatcaggtgtggtgctagatgtagtatgaaatatacagtcacttcagcatttctgtaggaggaagatggcctagggcatggtgagatgttaaatattttagaggaataatttgaatgtaaagctccaggactagagattaggttttgtttacctgtgtccctaagacctagtatacaatacttaataagtatctgctaaatgaatcaacaaatcaatgatggagaaagccctaaaagagccaggggagcaggggatacagagctttggtaggaggagattaactgagaagagtcaggagagaatggcctaggagaaagatacggaaaaatctgtaggtggaaaggactgaagctctagggagaaaatgcctgaccaagtctgtaccagaagcaaggcagtttagggacaaagggcatgagcttagagtcagatttcctaggttcagatccaagcatcactacttattttctttaagaacttgggcatctgtaaaccagggataatatcttcttcaaagggctgttgtgaagattcaacaaggtaatacatataaacgtcacagatcagtgaccagcaagagtaaggctcggttgaccattgagagtggcaggatttcagagtgggatgaggaacctgtggagagtcataaacatgtgaacagtcactgtgtgatgaaaaggaaagacagccaggcagggatgaataaaaagttgacccaacagctatgagtgtttcactgaccaaactgttgtcttggtgatgtgactaatcaactcatttattcaattttctttaggcttcttcaatgtctttaaagcaaaatgtaagaaaacggatgattgagttgacctgaattttgggattgttaagaaagctggattagaaggtcaaagggattgggacacgagaccactcagcgattaaactgaaaaggaaagaagtcaagccaaaaaacggctaataaactgaaagaacagggaggggtttggggactgaaagtctagggggagatggtgacagtggcagatgtggtggacagagtagtttccagtccaaaggttcagagatggagcagctccaggaaacacaaggtgcagttaaaccttggatggaggtggcggaggctgagcaaatggaggcaaggccacacatttttccttgttcaactcaaactattctgttcccaagcgtatctcatcaaaatgttttgtgagcaaagaattcaacaataaccactctagtaaaatcctgctaataaacttcttaatatcttgaaaagctggaggatgtatagttaagtatagtttcactttagttgaatgatttcttattaagaaattaataattacagttttagttattcaatcaacatcacagaacatcaaaaataggtaatccttcccaaatttgaattagatccactgatatcaatgcagggggaaggctaaaaatagaaataaaatatacaataaggaacatcaatagaatattaattataccatacattgacacttgaaaaaaataaacattacgtgaactgagtgatataaggtgtcccattcaaatcaaccaaggcttcttaagggatagatcatttttcatcaatacctgagatatccggcccagaagcttctcaaaaaatgttaatccttttctgttctcatctcagtgcatctcagatttctctgcctcacccttcacacacacacacacacacacacacacacacacactcactcactctctctctctctctctccctccctgatctctacgtgtaatttatgggattcattcattcaacaaatatgtgtcagatactgttctagatgaatggggccatagcagttagagagattttagatctgtgctcacgtgaagcttaaattctaaaaggagagacagttaacatattcataaatcagatagtaaaatgtgctataaaaataagtgatgtgttaatatttcacaatgatttgtatattaagtctgtattgtacataaaactatcatatattaatgtgtctcctcattatcctttaaattggggtataagtgtgacaaaatgatccaatatggactatttgcagaacagaaaatcactaaaaatgctgattctgtttttctgctcaagaaatcacatggaatgtatggcttaattatataggaataacaaatatataaaaatgtttttacaagagagcgtatttcctcgcccccagtcttcctcttgaagctaaatctagttaagagtgctattggccagtactttcttttctccatacatgtcaaaagtaaacatctgaatctggggtcctttgagaccaatcttccaatccataatttctaattcaatctccatgatctaattagcagtgttctttccttgaagaactgaagtataagaagtctgtttaggctaatagaataatttattaggctacctttgaaaatgaaaaatctaaccactaccttgcctgtagaaaactttcttaatattttctggcatttggtttcatagccaagccaaatcaaaatgaatgcagattttgtttctaacctagaatcaggtgagaggagaaacagcgatcttatgtcgggtgtttcaaggtactgtcttcctttcatccaaccagttagtatagctagcacatcagcatcttgttttataaccaaatcccaaccaccatggacaggtagggtgtcccttggaggctgcaccaagtcctttagcctcagtgaacttcccatgaaattccagagctaggagagcctttttttcttcttcttcttgagacagtgtcttactctgtcactcagattgagtgcagtggcatgatcacagctcactccagccttgacctcccgggctcaagtgaacctccacctcaagtgaacctcctgaggagtagctgggaccatagctgcaagccactccgcccagctaattttttatttttttattttttatttttatagagatagggtttcactatgttatccaggctggtctcgaactcctgggctcaagcgatccacctgccttggcctcccaaagtgctgagattacaggcaggagccaccacatttggcttaggatatcttatttgtacttttactcatgattctttcttaagcaatcaaaaacaagttcaaaggcacatttgttatgcttataacctacccagggtaactaaattaaaacagaatggacaggtttcataaatgctctttgccagtggaacttttgttggtattctcaagaaagccagcattggccaggctgtacatgcgtattctgaaagacagatgttcacccctcccactgttccagttcagtatgtcttaggcacacattgatatcacaaaacactgaagagaggccgggtgcggtggctcaagcctgtaatcccagcactttgggaggcccaggcaggtggatcatgaggtcaggagatcgacacaatcctggctaacacagcgaaaccccgtctctactaaaaatacagaaaatttgctgggggtggtggcacgcgcctgtagtctcggctactcgggaggctgaggcaggagaaacgcttgaacccaggaggcagaggttgcaatgagccgagatcgcgccactgcactccagcctgggcgacacagcgagactccatatccaaaaaaaaaaaaaaaaaaaaaaaacccactgaagagaacctcagtggcccaagacctccataatgttatcactagtgtttcaaaggaatcctctgagaatattatctcagataatcagagcgtgcctgagacataagtcaaagagtaaccagtctgtcaccagatagattgctgcttcctttcttcttgcgtatcctaatgggagtggagggaattgcctcccaactctggggtaagcttttttttcccccaggttttcagtgagtgatcaaagaatcagagctgcaaaactactctggaacctttaagacccattgtatatcacacaaacagaatacatgagttaagtttcatactgtagggaatccaccctttgtcctgcccttctgcttgacatttttctgtactagagctcttctatcttcagtcttctgtataaggtaaagtctcatgcataaggcagcaatcccatgtttatacataattcctcaactatattttagttagtagcagtatcccttaacctagcactgccttgccgctatgcctttcaactccaagacgccagtgtaattctctacgatgggccctctctctacattgtgcaacaccttcccaagagcaaggggcagggtctggcccttccagccttatcaaacctttcttattacatctggagtattctagtattcaagccctcaaggaatgggaattgtgatgtttgtggtgaaattaaagccataatagaatggaaacaaagtagttctttaaatacatcccctgtaaaccatattaaaatgaaactttgaccctggataatcaagttattctacttttacatatttttttttcaaaatttgatgatcaggagaatagaatttaatgaatttaattttttcaactctgtatttctataaattgggtaaaagtaaatcttcttgagttagattgctacataagccccgtgctatgctgcctctgaaaaataattatgcgtattcctggttaggggctcccggtgtatggtaattagacagctgggttaaatgaatgataatcaattttcctgacttttcttaagcattaaagtctctttgggtactttattttactagctgagaataataaaaagagcattttaaatgttaggcagtgaaaatcaggaccataacactaaactatttaagtttccatgtgagattattttctttcattagctacagggacatctaaaaccttaaagtaggacttaattaaatttattttgtttgtttaaagtactttttgttttgcttttaaaatgaatctcagtaattaccaaaaagaaaaatgaacttaatttctttattatgaccttcagccagaatgatgaacggtatttaattctggaaaagtattctttaaaagccagtatgttaaatcactgacttctctcttagactagaacttacatatcagcattaaaacatactctgaatgctggatagccctgatttattattattattaattaattaatttattgagatggagttttgctcttgttgcctaggctggagtgcaatggcgcgatcttagttcactgcaacctccgcctcccaggttcaagcgattttcctgcctcagcctcctgagtagctgggattaccggcatgtgccaccatgcctggctaactttgtatttttagtagagatggggtttctccatgttggtcaggctggtctcgaactcctgacctcaggtgatttgcccacctccgtctcccaaagtgctgggattacaggcatgagccaccgcgcccagccaataagcctgaattatacaaaagataaaaataattttttttcttctaatatgctaatcttaattgtcaacatactatcctggtgtctagaaaatacctgtaaaggaatgtgaattacagcagttcttatctcattttctatattactgtgttctttacaccaaaatgtacaaataccacctaccaaagtttacacctctcaaaataaggctatggccatcatgctttaaaagcatggctctgtgtgcttgttcactctgtgtcctctgccatatgcctacacttaaaataacctggggatatttaaaacattccaaagcccaagccataccacagaccaattaaattatatgcctgagacacaggcatcaatagtttttgaaagtttctaggtaattccaacgtgcttgcaagtttgagagcactgtctcaaccaacttgttctcaggcaaacttctgtttatccttcccttctcagttcacaggggatgtttgatgctctccctccctaggccttctcactattcttcctgcgtatctctaccatagcatgaactaactatgttgtaactgttaactcacgtgtctgttcccctaatctactataagattaaggagtatttttatttttgaatctctgaatctaaccctttgcctggtgcatgggagaacccaataaattcatagaatgaataacctgttcctaagaaaaacaaaagcaaaaatgtagagttgtgttaatatttaaatgccatggaaaaagtaattgcttaggatgtgtttaaaataatgtttccctggtgggcaatgtcccatatttagaaaaacatctcatcatattagtgaaaataaaacatcccaacattaagaagaaacataaaatataactttgaattattacccacacagttgcattctttattgtaataagcacagaaaaacgttttaaacgttttctgtgataagaaatatctaaaacaacacatcctttctcagctccccttccatctttactagattatgtattacttccccaatcagtcctttcagaatttgatgatgttacaggagtttatataactgattttaagagtttaaaatacttagtttgcaaaatattttaactaagagtctctgtttaatgtggtatttatactgttaatattatcactatgattcagaaaatattcacatagtgaattttcctacaatataattctggacaacaagcccactcttaaacacacttttttttttaaactgttccaaatattttgctatttgttttacctaattatatttgcagcaatgtttcacgcctaccaatatgttgttgtttatctgttagattttgattcatgaaacctgaaaataaatcagatttaggaactgttttccaagatagtgatatattattcatttatctaatttatctttacacatgaaatgccggattatctcagtaggtaccaaattaatttaagaccttaccaagtagtatacaatatgcactcattctgatgcatataaaagacaaaaatgagaaaaaaagtgcaatcctctacctttaaatgcctacactgtcctcaactattgttatccaatttttaactttagtacattaagtacagctacatttttttttttctttttcagacagggtctcactctgtcacccaggctagagtcccgtggtgtaatcataattcactgtggcctcaacctcctaggcccaagccatcctcccacctcagcctcctgagtagctggggctacaggcatgggccaccatgcccggaaaatttatttattttttatttttagtagaaacaaggtctggctatgatgcccaggctgtcttgaactcccggcctcaaacgatcctgtcacctcggcctcccaaagtgctggagtaccgctaatttaaaaggcagtcattgaaacatatttcttgttctcttttgcatcatggagttatgactttaaatcataagtacagtatccttagaaactgcccagttttatcagaaataagttctgaatgtattgtcaattgtgaaaagacaaaagatcacagttcctaatattcagttctaatggcatggttccccaaaatgtaaaagctgtgactgagacaattatttcaagagagcttcagctgtaaataaacacaaaactgaattcctttgccatgcaaacaagaggcacactttcaaccagtaacagctggcttcatatattcatctttggatgaaaagagcagggcagttttttttttttttttttttttgagacggagtctcgctctgtcgcccaggctggagtgcagtggcgggatctcggctcactgcaagctccgcctcccgggttcacgccattctcctgcctcagcctcccaagtagctgggactacaggcgcccgccactacgcccggctaattttttgtatttttagtagagacggggtttcaccgttttagccgggatggtctcgatctcctgacctcgtgatccgcccgcctcggcctcccaaagtgctgggattacaggcgtgagccaccgcggagcagggcagttttaaagttgacttctgagagcatcagattttggatagtgtcctttctcaggtcctgtttccttgtctcctcatcccattttaaaagccagacacataaaccccggcactcctttagcgaagggctcagtgagggcgtttttgccacccgtggccaggggtcattgggtcagcaaagtcagaggaaacctagaaaggcagaagcccaggaggttgacgccctgcgggtctaggggccaggtgctgggtgtctctcctttcgtgtgcggttcccagcagcaggtcctggtgggcgcagactgaccggagaggtgtggctcgccccctccccagaccccgaggtggcaatgaaacctccatctcctggcttgattccttgtgctataaaaaatcttccactggccctttgcatctctcgccctccatcccccaaagccactatcgggaggggacaaaaataatttctgaggggccatgggcactaaaaccacagcagacagaggctgtgtctacctgaggaactggagaggtagaattagagggggaggctgggcatcctcggcggcgccccctccatccagcgtgaaacccacgaggcgcggcgtctcgagtggcgggcgggcagggggctgcaggattcacgaagccacctccgccggggaccgccttctctcggagtggcctcccctccggcgttccgctttagtaagacgacactcaggccaaacagccgcccccggccagcccgactcggctctggagggagcgccccgagggagtccagccggaggcggagaaggccactcggccagaaggtggggagccgccggcgtcccctcgcacctccgtctccacagcagggggaaaggccctgatcgccgtggtccacaccaccgcgtccacctgaggctcgcctcgcttcctgggtccctagaggggtggcgtactccgctttctcctgcccccaagtggccgcacccctccgcgggacgcttggttgggtccagggcggggcgggcgggcgctccccgtactgccgcgagctcagcgcgcagctcccgcggctcggctgccgccgcggccagttggggcgggtcgggggcggggtctcagggggcggggattcgggggggcgggtcgggtcgggaggcgtgggtggggggcggggcggacgcggagcgcccctctggctggcggggccaaggggctgagaggagtggggcaggctcggcgccggtaggaagagtcagaggggtgaccagagagcccaacgcctggtgctcaagactttctccgaggtatgaacaagaaccaggcgtctgggccctttccgctcgccccatcgctcagccgccgcgccccggacgcccgctgtgccccctgccggcggggcggcggcgggactgggtttcgggagggtttctggaagtcgcgagtcccagcgaaggcagtgcaccgctctccgcctctttcttcgccttcttctcgctcccttagctctgggtgtcgggcaccggtggtaaggtcgcttctccgtgagtcggaggtcgctcactctgggacgggcggacgaggccctagggcagccgagcccggcagcgggggaggcgtggagctcggggcggcttcagcggcgggggcgggaggctggtcctggctgcagactgcgcgcctgggctccgtgcgcggtccctggttctctgcatcgcggaggtccccggatcacagggctccctggcgggccccggcacccaggtctgtgtcgctgtggctgggcgccgggactagcacccgagtcccgcgctcccgggggctgcgccgtgccgcctgttgtgcgcgcgcagaggccggacagcccggctgcgggaagggacccgagcgcagggtctgccccgcgtcccggaaagtgcctagtctgcggagccggaggttgagctggggcagatcggcgccagacgggggcctgggtgagatacgagttgggggtgcggcctgcagaatttgggtttctggaggagcttacggcgcgctggcggagccccaggcgaacaggagcaccggattcggctccgggagggccaggcactgtcaggtatggacagctgcggtccacccgtgtaagtgtaaagtctacagagattaaaacaacacctcgagtcctgggacagcataacctaatggtgcgggcgttttcttaaaggcacgaatagatgggaaaatgtcaaaataagcatattttaaagttgaaagctggcagattttcaggccgtgtagttgtgtagctagtgtccaaagaaatattagctcgttttcccccttaacaccttttcatttttatttttttacgcaaaatctgttttgccagtatttccctcaggagctgtgcattgctcacagcagggaaggaaaacttcagcaagcgttctcaggttgcttctgacttccagcctgtgctctccagcatttctgaatgtggagaaaaagtatctcttgctggattttccgagtatgattcccttctgttcttctctgggaccgggcaatgtttgtttatgggttttataagcatctatttaaatttagtttttgcacgaaatactccctcttgccacagggtgtagtttggggtttagaaaatgctgttggagaaagctgctagtggcttcattttccaagaatgtaagtcatttcctttctgtgatttcagggagttgatatttcacagcatcaaaactttgtggggaaaattttccgtaatacatctgtcattaaaaaggcttgtgacttttgggtttccttcttagagcagtgcatgaatttaggttcagcagtgttaaaggatgagaaatttttttttagaatttagagcattatgagactattgtagaaattttaactaccaggacctacaggatggagagtgggggaggggagaagaccagaagagaggcaggaaaacagatgcctttgctgatgtcctttgtagtataaaacttaacagcaccacagcacctaatcattttctcaggtgtggctttgagaaataaacgttttatgttaaaaatgaaaatacttcacaatatgagacagctggcatttgaatacttttcccagtatgtttgtaaacattttggattcatatttcatattaaaatggacatttagtaggattattagatgaaaagggtcccccaggggatatctaatatcaaattatctgcaggacatcttctccagaaagcagactgactgtaatatgaactaattttcccccctttgagttgcttgcaagaatctctgagatctgacactgatgggctacagtaatcagcagttcttgcagtactcaagacattttaaggggcaggaaatctttcctatttccagtatctcctttttgggggcaacaagggtaagctgctagttttaagtacataatttgaacttagagatttaagatgctcctggctgtacaggaaaacgcctgaaaacagcatgggcctggatgaagacgctgcttttgaaagcaaaatgccagtgtgctaggtagcggtttttagttacaaattcttaaaaaaaattgttactgaactaggttagctgaattggggggggggtctttttgtagtttttggattttgtttccacatttaactatacttataaagcttttggctttctgaacttatgatgtaatagactgcgtagccttttgtggcagatgcttggaatgaaagtttcaaacataattgtttttgactgagctgtcaggttcagagttgagtgtaaatgagtcctgtctcacaactaacttttttgataaaggaattctttgtagttttcgatttggatgttgcacattttgatttctaaagttgtgggtttttttttttttaagaaaaataaaacctgcaaacaattattttattacatgaaagccagtaccaagaaaagattaattcagtccagatgtaaaaatgtatgtgaattttagatttggatgatctcaacaagttttcccttttgtggatgggactgcctggatcccagatggcattcacaaattatcccttaggtagttttctgagttgagaatgagatttcttgggctttccctaaaatcattttaatattaagtcttctaaaggatagaaagttttttgcatttgtacatttttgcatttttctgttcattaatacaaacctcataaatgccctagtttggtagatgaagcatatttctttcataagtgggaaaacaggaggtattcagtttgtgtatccttatgggtaaagcatagaaattttggctctcatttttgcaatttcaactttcttcttttaaagtaaaaaaaaaaaaaaaagttttaagtgtgtttacaatcctcaatagaatcctactgtaacacagtttgtggattcaggtatagcaattggtccttgtttgatgatcccctacctcctccccacccccaacgaggaaaaacaaacacagtttattaaaaagtcagtatgtttttaaacgtgtactcccagtactagagttataaaggctgtttgttgcacacattaaaattatgtatttttagaaagtctttgtatgattatatcattacacattttgggagtgtgtttatgtcgtgattgtgtataaaacaatggagagttaggagaggggaatgggaaagatttagtgaaggagttttatgagtagtgaaatttcagttataatgtatgttccccaaaacccaaacaggaaaaatgttatcgttggtctctgtggttaaacttttatacagagggtagttgagagggctttctgaattgcacattatcctgaggaagaggctttgggggcctttaaaagtaagtagaaacaagttaaagggataatttgagaggaacgaggaagtggaatactggacattgaattgcaaggaaaaagttagaaggataagtatttaaaacaaggctgaagtagagagaacttactgtttagaagtgtagattaaagaataaggtatttttagctgagaaaaaaggatcagaatgattagaatcaaggtgccctataagatctgtatacaaacttgaaataggactgctaattgatagttatcctggaaattttgcctgtctttgtgttgaatcactagtttggtgttaaataatgtgcagggactggatgcttataactgtatcccgtacactccaaaagccacttcccatttcaaagactggaaacattttttgtttaagtgctaatgattctacaaatatttaattagtcccccaacatttgaggaaactactaatgtctacttcccatgctgtgggaccagagggggctctacagcagtaatggctgaagttattatgaagttttaggtagaaacaagcaatctgtgcttctcattactttatgcgatttagtgatgtaattacttctgatgcaagtttgtgtatgatcactttttgtatatatcaaatggaacagagcagtcatgcagtatatataccatattgatcaaagatgaattacagaacactgagaaggggaaagaaatcattgatctctcagctgattgtattgcttcaagtcaagaagagaaaaatgtgctgaaacaaattcacagatgaaccaaatacagtcgcaaggagaaggcagtgttttcctggagcttccttggagtggtctgtagcatagcattttcttttcttttttttttttctgaggcggagtctcgccctgtcgcccaggctggagtgcaatggcctgatctcagctcactgcagcctccacctcccgggtccaaatgattctcctgcctcagcctcccgagtagctgggattataggtgcctgccaccacgcccatctaatttttgtatttttagtacagatgaggtttcaccatgttggccaggctgatctcaaactcctgaccttgtgatctgcccgcctcggcctcccaaagtgctgagatcacaggcttgagccaccgcgcccggctagcatggcattttcttgaatgtctttccccagctgtatggtcttgtcttagcagagttaaattgatatatcaagaaactaggtagagatttggtcattatccaggtcattgcattaatgtgctgataattgggataattctgaccaaaaatatctatttagactctcagtattccaaatggatcctcttgggggtgttttcagatgttttccaacaacattatctttgtacatgttttatacaactttgagcaataatgttttactgatacatgaagacagagggaaaaacaatattttgaattaatttatagccacagtttcatgtgagggaggaaatcatttaaaaaaattaagcaatttcttgatgcatattttaggaaatataatgaagtttctcacttagcttttcagatgatttttctctctgattgggttaaataaaatgtaattaattttctccccacaggtagtagcacttgtgtgtacagtttcagtagatgacttttttttttggtccctgtagctttatttctttgaacttgttactgaattatacacaaccagacaaatgcacagatcaggagtgtacagcacaaaatgatcacatttgggcaactagcatccaaatcaagaagcagaacattaccagcctctctttacagtcatcatctttgcccccaggataaccattatgctgacttttattgtcatggttagttttaaactgtttttggactgcatttaaatgcaataaaatacacattttttggtcatctttagctcagcataatgtcatgtgatatatccaaattgatgtaggtcgcaataggtcttttttctgttatttctgtgaatgaatatgcccagtttctttatccattttgttggtggatatttgggtagtttgaggacagtacatggtaggtgaccttttgatggctctaaaaaatgttgagcactttggggttgaaagcagagtatggtcttaaaattaaaagagaaaaagtaacgttagaggtaagatgtgagaggaaaaaaagcaatcttaagaaaactttaaaggttccactcagccactgtatcctaaggatatagtttggaatataccaactagatatcaccagatttcaattgagaattggtaagaggaaggaggccttaggtgacatctagccagccccatcatttttcagagatggaggcagaggttgaatgattcatacagagtctcacagctgatgacagcgccagtagtagaagctgctctgactctcaatcttgtctcctctagtgccacatgcttgttggagagagagaaggcaagatcagggctaccaactgtagctgtgcaggttttgccatgcaaggtgggtctgaaaaccagctccctactatgtagtccaagcaagtgagtccattggggggctcactgcctggaggatgggtgcccttttctgattaatgcaaaggtattctatggctctgttcagatagactcagatctgcccagaggaaatggatctgtagcccaatgaggcagaatttttcttctttcagcctgctgtacctctgccctccatacagagctctgttggggcttgccttttcccttttttctctctctctctcacttctagggcttcctaatgagactttgggttgtaagtatcaagtaggagatctcttgaggtccctcttgattcactcttgttgatccataaatgatctaggatggaccctaatttcaaaggactgctttgtcaatatttttggaataattcatccttaagaaaatgtttcaaaaattcagtttttggacttctcctgcctttatgcttctccctcttttctccctttttgtgtcttccttccacccccatccagttatcgtttcttaaagatccctggaaacatccaatctttgtctactgagagcagcagtgaaattctgacgctaaaatctgtggcagtctccaggaagtacttattgtaaaacataagattatgatttcactgagagatctaacagataaaacaaagtgcttgcaaaggaaaactattcatgtatacattttattttatgtttccctaaagaataaaggacagttttattacttaagaaaagactcagagcttcagcttaagctcattaaaaaggtgaagagaagttaaaattagagaattttataaatatgtggtatttatatatcctacccgaataagatactgcttatcacagcaaaaatttagcatatgtaatgttaacaagtaaaaaatatgctgaccatagggccacagctctgacaagttgctcatgaaattactacagaatagcgtaatccgtattgaagacagcatagaagagggatagtaaaatataatgataggaatgaggtcttcgagatcagttccctggggcccaaatccagactccagtattctcccatgtgtaaccttggggaagttacttaactctctacacctctttttcctcatcagtaaagtgggagatagttataatagctatcccacaggattgttcttatttttaagtgaaatggtacgtgtaaaacaaatggcatggtctttgatatataataaacgtcttacgtgatgttagctattgctgcttaagacaaaaagaagtgatgtataaaaggacttatagttttattggaggttcccaagccttcatttataagcatttcatgagatttaactttgttttttgatggcattaagcaggcaacaaaacctagtatttctcagttacagatactggcaagtctgtgttgctgcagtaggagcagctggcctgttgcactgattactaattgatcgagttatttttcttaattctcttctaatttccagccgtctcagtccttcagcttctgtctgctagataactgtttctttccatatgtcaaaaaagccagcctgcagatttttaaaattctccttacggtgactgatgttgtgcaaagttcttttaaagagtaccactgactggcccatgtcttttgctcatgttccctgtatggcttcatgtgagtacttctgaagaaagccactattattgatataaagcagttctttattcccaacccctaaccattggcacagtttatataatgtgggtcagaaccatttgtgattttctgttatgagggccagagtttgagattttaaaccattcattcaaagaaacttaagaaagacacagttaaacaccttagaaagatacattttcatctaactagcctaattacgagctcagctaaaaaaggtacaggatcctctagaagaatcgtgctgtatcattctgatctgtttgttaaagggcgggggacctagtccagataacccagttccccgttttgattgtgtgtgtaaaatcttgagcttagtaaacttagcactttaaaaatgttcactaagtccatcaaaagccaggttttatgtctttatgaagtattcaggactgtgctgaatactttgtgcaatttctgtcaatgtgtttcatgtctagttgggggaacaaaatacatgtgtttgaaaagatattagatgtttccagatgagtgtgaagttgagctttcgttttagggtccaaaatcaaggatgatcacataggatgttcccagccttcctggggccactggatttatactggttagtgaagtcaggctaagatttttctatccttcaagcccatagaaaaggggcttttctagtagcaacagaatgtgcaagatctggtaaaaatctcaaatattaaaagacaactatgaaattaaaattattaaatgtttaaattcatgcattcaatataatgtatgcctaggatatgccaggcactggtctaggtctgagagatgtcagtgaataaaataaaggaaaaaaaaaaaaaaaaaattctgccttcgtggaccttatattctattaggaggcaatcagcataagaaaataagtgttgtagtattttggaaggtaataagcctgatgggaaaaagaaaaagtagagcaggctaagggacagtaggagtgctgggggagggaggcagggactttgcgatttggtggagtatagtcaaggtaggcctcactgagaagagggcttgaaggaggaagagagccacacagagctagctgggggaaaagtgttgcagcagagggactagtgaaggcatcaggcggaagcatgcctgatgtgttccaggagcagggagaaggccacagtggtggagcactgagagcagggagagaaggagtagtagataaggttagagatgtttggagagcacatgtttggcttgtgtggactgtattcaggacttgactgtgagtggaatggggagccaggttttgtgcagaggagtgagaggatttgatttgcattttaatagaatcactggttgctgtaggaatctggaatttagggaagaggtctaagttggagatacaaatttggaagttgccaacagaatttgggtgagatcacttggggaatatgtgtagtcagagaaacaggcttatggaccaagccttggggcatatcagtatttacagtttgtagagagaagaagaaatcacacacataatccaagaagtgttttaagccaaagtaattatgcacgtttttccaacatagtgaacccaattaagtgtctccattccttgagtaacaatgttatcactagaagatattgtgaactctattgatctacacaatggaagaatgaactatgagttgtttttctaattgcgttgatggtcttgggctaaacctggatgcttcatcttttagaggttgtgttgataaggaggaatcagtaaaagaaaattaaaaaggagcaagcagaggataggaagaaaattagaaaaatgtccttgtagtcaaagaaaatatctccagcagaagagtggatcagttagctcacatgttgctgagaagtcaagcagggtgaagactgagagttgctcattggatttagcaacctggggagtcattggtgatgatgacaagagctgtgtcactggagaagtggagatgaaaaccttattggagtgggttcaaagagaataaaaaatttatgaaagataactattacttgtaattcagttttgtatattacaaatattcaatattgatgtgggtacattttaatatgcctggtaggatgtgcagtgggactttggaaatgggaatgttggaggccgtgcatatcttcagcaggctttgtcagggttagggagcctttgagcttttccctagttattattggtaggggtagggctctagtatatagattgtagtttgtatattttgaaatagagaaacggttctatgcagttttttagttctttgttaaatgtctttggatgagaactatatcttgaaaatactcatactttgtttaaagactttttcatttctagtaaagatgtgttctttaattcaatctattgatccttgtcttagattgttttttgatactataatggagtaccacacataaggtattctgtccataaagaatggaagtttactattgacattctttacagaactagaaaaaaactatttacaaattcacatgggaccaaaaaaaagagcttgaatagccaaggcaatcctaagcaaaaagaacaaagctggaggcaacatggtaccatcttcaaattattagagcaacagtgaccaaaacagcatgatactggtacaaaaacagacacatagagcagtggaacagaatagagagcccagaaataaggccacacacctgcagctgtctgatttgtgacaaacctgacaaaacaagcaatggggaaagaattccctatgcattgaatggtgctgggataattggctagccatatacacaagattgaaattggactgcctccttataccatatacaaaaattaactcaaaatggattaaaagcttaaatgtaaagccccaaactaaaaaccctggaagacaacctaggcaataccgttctggacataaaaatggcaaacatttactgatgaagacagcaaaagcaattgcaacaaaggcaaaaatggacaaatgggatctaattaaagtaaacagcaaaggaaactgtcaacagagtgaacagacaacctacagaatggaagaaaatatttgcaaagtatgtactgacaaaggtctaatatgcagcatctataaggaacttaaatttactagaaaaaaaatccattaaaatgtgggcaaatgacatgaacagacacttgaaaagaagacatggatgcagcaaacaatcatatgaaaaaaaagcttgtcattgatactggagaaagcaaatcaaaaccacagcgagataccatctcacaccagtcagaatggctattaaaatgttaaaaaaataacagatgctggcaaggttgtggaggaaaaggaatgcttatacactgtttgtgggagtgtaaattagttccaccattgtggaagacagtgtggtgattcctcaaagacctaaaaacagaaatacagttagactcagcaatccctactgggtatatacccaaaggaatataaatcattctattacaaagacacatgcatgcatatgttcattgctacactattcacaatagcaaagacatagaatcaagctaaatgcctatcagtggtagactggataaagaaaatgtggtacatatatatcatggaatactatgttgccataaaaaagaatgcgatcatgtcctttgaggtaacatggatggagctggaggccattaatcctcagcaaactaatgcagaaacagaaatactgcatgttctcacttatgtgggagcttaatgatgaggacacatggacacatagaggggacatacactggggcttaccagaggatggaggttgggaggagggagaggatcaggaaaaataattaatggcttaatacctgggtgacaaaataatctgtacagcaaacccccatgacacaagtttatctatataacaaacctgtactcatacccttgaatttaaaataaaagttaaattttaaaaaaaggaagttcatttagcttatggtttgggggccctgaagtccaagagcacggcaccagcatctggcccaggtcatcccatggtggaatgcggaagcaagggcaagacagaaagcacaaggggctggactagtttttataacaacctgctcttgtgataactacgttaatccactcataaggacttgacccttatgactcagtcacctcttgttaggccccatctcccaatgctattgcatcggggattaagtttccaacacatgaacttttgggggacacattcaaaccatagcagtcctttttcatgaaaggtgagacatgtgctttgaggtggcttctttttcagcaatggtgataggtttgatctgactaggccacacagcatagtgccccactggcctggaagccatcattcacagagtagatggctcaggttagtgaatcccaagagccagagcaaattgagtaatagaaaaattgcctcgttaaaattttaaataccttgttgatgactttcatcatgaagtgttatttcaaagcatgtgattaagcaattttcatagttctgtattttataattatacaccaagaattttctcttctgggaactacctttgaattttgctaactgtctgtaatactgtcatcaaaatgaatcaacaggtgtctgatactaattatcttctctttctctaagcttattaaaatgctaacacataggcctttaatgcatacgtattgtttttggatagttagaagctcagagtggttggtagaatgaaaactttgttacatatattttagtgtttggtaataccaaagtatagtattagtctttagaaagttgctaatttagaaaatgccggaaagggcgaagactttcctttgcagtggattagggcacaaggtttttgagaagtggagctctggtgattatatgtgtgtttccagtgggttgtggtatatgcatataatgtcagcattctcttaggtactgctttgccagcactgttttattcgcatcattttgaatgtttttttcagctgaaacttgtaagttactctacagttagttaagttacagtacagttagttagaatgtaattggcttggaacaaatacacgaggccaatgtggaataatttcgcagtgctggggattttacattgtagatactggagtatgcagaggtataaaactgagcaagttttgaaataaatcttatgtcacttgtcagtgactacagaataaagtccagatctcttagggtggaattcatcatgccagcccagagttgcaagcctgtggcccaccaacaagtttggctgcagacatgttttggcttttaacatagttatttgccaacatttaaaaatagagaaattttacattaaaaaaattgcattttataccttctcttgaaaaatttgaaggcctggcaaggtctgttgtagcaacataacagcttccccctttatacggggtgtgtgctctgtagtctcccacagtccctggcagagactctcttgtcctcaacattgggaccaagctgttgtaggcatttttcatcctgcaggcttcacttctttgctcctgcccttgtaggcatgtgagtttgctaaccttgtgtttagatacttatttttttttctcagagttccttaaatctagccaaattgttcttcccattgtcctgtctaatgcgtacacacttcgtctacctcatgtttctgcttctggcttctccttccgctgcgtccgagctgcatgttgctcatgtcacatcattggaacttagcacatttctagctccccagctgtactagtttcttgaagacaaagactatttaatttactaacacctatcaaatttattttagatcttctgggttaactatttgctaatggtttggctgcgtccccacccaaatctcatcttgaatttaactccaagaattcccatgtgttgtggaaggaacttagtgggaggtaattgaatcatggcggtgtgtctttcccgtgctgttctcgtgataatgattaagtctcacaagatctagtggttttaaaaatgggagtttccctgcacaagccctcttctcgtctgccgccatatgagttgtgcctttcaccttctgccatgattgtgaggcctccccagccacgtggaactgtaagtccaataaacctcttccttttgtaaattgctgagtctcaggtatgtctttatcagcagcatgaaaatggactaatactctattgttagatttagcttccagtgggtggtaatctatgattatagtgacacctgtagaagaagtagaacgtaatcaaaatcttatgtgaaatctacttcctcaaatagtgctttcttaatttactatgccatttcctttgtagctttgttagtaacatttatataatccatttgagtatgaattcactaaacacctcatttattgccatttccctagttctgtcacatagatggatgatgcttccagatgaatgcgtcattactatgtgccgttttattattttagatatgcttcttcctaatgactaatattgttttaaatgtcttatctttttattcatttggtaaatagtatgtctgtgatattactgtgataccttcccttttgaagcttttactttttagcaggaaattcagatttaaataatggagtacataatgatttaatttcaaaaagtgttattaagaagtagaggtgctgtgagacttcggggcagtctgatctggtctaggagtggggactgaagtgggaattgcaacaggactgaattctgaattccttaactttctcatatatattccatggcagtttgtaaagtaattggaatgtaaaaatttaaccttacaaacaaaaagataattttgtaacaaaataatagttaaaaagttttttccctgagaacttaacttggctgttgtcattgcgttagtgataaacaaaattatgatttatagctctagaatttattgtttggtacctgagttgaactctgtttaaataagtaaacaaaggacaaatggggaattaggctagaaatttcagatattagcctggcacagtggctcacacctgtattcccaacacctcaggaggctgaggcaagcgctttgctggagccccgaagtttgagaccagcttgggcaacatgatgaaactctgtctctacaaaaaatacaaaagttaattgggtgtggtgatgcgtgcctgtggtcccagcactctggagattgaggcgggaggattgcttgagcctggaaggtcaaggctgcagtgagctgtgatcatgccattgtactccagcctgtccagcctgggtgacagagcaagatcctgtctcaaagaaaaaaaaaatcagatgtgaatagcttacaaaaacaacttttattttatgaaactataattatttcaaaggtatttgtaatgaggaattttctcatggctttcagaaataggatataaaaaataaacttagtaatcccccaacagttactagtggatagcacctttatttaatacttgcaagcccataactgaaaaattaatactttattggtcggaagaatgaagtaatatggtatcctgaaaaaaactcggcagtgaatttactgacatgtgtgacccaaaatatagagtggaattttgtgtggttgcgtatgttttatcgcaacaatcagaaatgttttatgtattttcttccaaagaaaatagaattctatacttaacccatctaaatatagtggtaaagttaattttttgcatagtttagtgacatactgaaacaaaggtcagctgcagtggtgccatttctgaaatctcttttgaggaactcacgttacttacaattatagaaggagattcagaaacattgacatgtttaagggttttacttcaaagaaacccaagattttcaagtgtaatattaaggatatttaaggaaattaaaatcaggaacagtttttaataaatgttatctcatctagaatttaaaataaattctaattaaatcttaaaagtaaaatcttttaaaactcaaatactgattttctgaaccctcattcattttaaatctgtgaaaggatgttgagagctaatggtttgtaattgactaaattatttgcttctacaggtgcctagagaaatgtaaagagaaattttcatgaaatataagttgtagagtaaaacctagcagggaaagctaattgaagttatctaatttataaaacaacatttgctttaattactgccttacatattcttgaactaggctcatgttgctgatgagtaaattttcaggaaatttttaatcagtatattatagatacagggtctaaattaattcacattatcagtcatttgttcagagcagctgttaccctgaaaaatactctattaatttatagaactggttaggaaagggatatgaaagtaaaggtgttttgaaatgattacatattatacatttaagggtaagatactaaggacggttgcttgatttactctttagaacttatttatttattgagacagaatctactcctttacccaggctggagtgcagttgcataatttcggctcactgcaacctccgcctcctgggttcaagtgattctcctgcctcagcttctgagtagctgggattacaggcatgcactaccatgctcggctaatttttgtatttttagtagagacagagttttgtcatgatggccgggctggtcttgaacccctggcctcaagtgatctgcccaccttagcctcccaaagtgctgggattacaggcatgagccaccgtgcccagcccagaactttgtaatcttaaaattagaatgcaggaggctgtgaagctcgaatgaaataatgctggtgtttttgttgttttgagactgagtctccctctgtcacccaggctagagtgcagtgccatagtcttggctctctgcaacctcttgtctcccgggctcaagtgattctcttgcctcagcctcctgagtagctgggactacaggcatgcaccaccacacccggctaatttttgtattttttagcagagacggggtttcaccgtgttggccaggctggtctcgaactcctgacctcaagtgatccacccacttcagcctcccaaagtgctgggattacaggcataagccaccatgcctgcccaaaatcagctttttaaatgatgaatcatatgcaataataaaataaacaaattttaagtagataatttgatgagttttgacaaatgtatatatcatcatgtaaccagcactgcggtcaagatacagaacatttttgtcaagccaaaaagtttcctacagctcctttttagtcagtctcctcccctgccactctagatgcttttgtatctggccatgtttcactttagcatgatgtattcatccattttcttgcacatatcagtagttcctctttgttgttgggtggtattcagttgtcacaatttgtttattcatttacctgttagtggatatttggattgtttctaatttggagctattatgaatgaagttactataagcatttatgtattatataagtcttgggggacatagcttttcatttctgagttgtatagtaagtgaatgtttattaaaaactgtcaaattcattttcaaagtggctgtattatttaacattcccaccagccatgtctgagagttctagttgctccagattctcactaagatttggtattgtcagtgtttttaactttaaccattctggcaggtgtgtagtggtacctgacttcgatttttatttgcattttcctaatgactaataatgttgagtatcatttcaagtgcttatttgctatttgtatatctttggtgaagtgacttttttggccatatttttaagagttgcattgttcttgagttgtaatatttatatatttttggatttaagtctttaatcagatatggtttctatttttccaaatatgttttgaaaatgtattttctgttatgatgatttctttgtcattttttaagtgactttcagagggcaaaattaaaaagcaaaatttttgtggttcatgtttttaatgccctaagaaaaccagggcaacaaagatcttcccctgtaagttttctatgacttttagagttttagcttttcaatttgggcctgtagttcatttcaaagtaatttctgtataagggctgaagtagattagaatccgattctggatttttaccgaaaaaaaaaagtccctgggatttttaaaaactttattttgaggtaatttaattttaatttttttagagacaagtctcactctgttgccaagactagagtgcagtgcatgatcatggctcactgcagccttgacctcctgggctcaagcagtcctctgcctcagcctcccaagtagctgggaccacaggcatgcaccaccacacatagctaattttttatttttaattgtttttgtggagatgggggtctcactatgttgcccaggctggcctcaagtgctcctcccaccttagtctcccagagtgctgagattaaaggcatgagccaccgcacctggcctgaaataattttagactcacaagaagttgcaaaaatagtgtacagagtctcccaatgataatcaactgtagtctgttttcaaaaccaggaaattgacattggtacagtactattaactagccttggatttcttcagtttttatgtgtactcatgtttaacactaattgaactttggttgtagttgcattgaatatatagattagttatgggagaatcaatatcttaacaatattgagtcttcctattaatgtacatttttatatatttagttaggtctttttttttttttctttgagatggagtctcactctgtcacctaggctggagtgcagtggcgcagtcttggctcactgcaacctccacttcctgggttcaagcgattctcctgcctcagtctcctgagtagctgggattgcaggcgcacaccaccactcccggctaattttttgtatttttagtagagatggggtttcgtcatgttggccaggctggtctcgaattcctgacctcaggtgatccacctgcctcggcctcccaaaatggtgggattacaggcgtgggccaccgtgcccggcggtttgtatgttttatcatgaacatatgttaaattttatcagctgtttttctgcatctattgaaatgatcatataatttcagtttttcatcttttgtggtgagtaacattgatttttgaatatcaaaccaatcttgcgttcctggaatacacccaacgtggtcatcatatgttgtccttttggtatatattgctgaattcagtataccaaattttgttaggaatctcgtgtctatgttcatgagggatattggtcatttaaaacattttcttataatgtcacctagtttgggaaatgatggcctcatagaaagagttgggaaatattccccttttttggttttctggaaaagcttgtgtagaattgatattaattttttatttgaacattgatagagtttaccagtgatgccatctgagcctagaattttctttgtcataaaatttttaactaaaaattcaattcatttaataactgaggggtcttcagaaagttcacagaaaatgcatattatgtatggatttcagaatggttttgcaccgaaataaactcatactaacatgttataagatacctgaataggatctagtttgaggcactaaaaagggtaagacagcaggacagcagtttgaaaagaacccctctcaaagcagcatgaattctgctgaaattgaggcaagagtaaacatcaaatttatggtgaagcttgggtggaagaatggtgaaatcactggtgctttagaaaaagtttatggggacagtgccctaaagaaatcagcagttggtggataacttactcgttttaagaagagactagcaaatgttaaagatgaagcctgcaggggcagaccattcacatcaatttgtgaggaaaaaaattcatcttgttcatgccctaatttaagaagaccaacaattaacagcagaaacaatggccaacactgtggaatctcagttaattcagcttacacaatcagaactgaaaaatttaattcgagcaaactttccactagatgggtggcaaaaccattgtgcccaaatcagctacagacaagagcagaacattcattggaaattttaaagaaatgggattaagatcctgaagcatttcttcaaagaattgtaacaagagatgaaacatggctttaccagtatgatcctgaagacaaagcactttcaaagcagtggctaccaagaggtggaagtgatccagtcaaagcaaaggtcagggcaacagttttttgggatattcaaggcattttgcttgctgactgtctggagagccaaagaattgtagcatctgcttattatgagagtcttttgagaaagttagtcaaatctttagcagaaaaatgcccgtgaaagcttctctggagagtttttctccaccacaacaatgctcctgctcaatacctctcttcacacaaggacaattttgggagagttttgatgggaaatcattaggcattcaccctacagtcctgatttggctccttctggtttctttttgtttcctaatcttaaaaatcttcaaagggcacccatttttcttcaattaaaaatgtaaaaagactgcattgacatggttaaattcccaggaccctcagttctttaggatgcactaggtggctggtattattataaaaatatcttgaccttttggagcttatggtgagaaataaagcttatattctttatttttatcttttaattccattttttccatgaactttttgaagtcccttcatatagggctattcaggttatctatttcgtcttgaatgagctttggaagtttgtcttttaacagatttgtccatcttatctatgttttcgaatttattaatgtaaaattattcataatagtcttattattgggtgctggattttgacagcttgggcttcattctagaaggatgaatgaacccattcattgggttcgatttttcatggaggataagtgtagataagttacttgggcattaaagagtttggaccttattctagcatgtaagtaagttacttgggctttaagaagtctggactttattcaccatgtaggtaagttacttgggcccagtttgatccttttgaggcttgcttttaaccttctatagagttggttcagggcagccttcagactgaagctttacttggcctactgaggtgatatccttcacactaacctatctgatgccataaatattatagggtttctcctctggctagtgggaatgagaactatgcccagctctatgtgagctgtaggaattgtttgacctattgcttgtcgaagattctttcctctgccttgtggagtttttttttttccacgttagcacagatcagtagttagccaatgtaccaggagaacctctctgaagatctttgtacctctatctgggttcccctacttcctctttgggattctgtgctgccccccaaattctagctgcctctgcctcccaaacttttctctttatcttctcaattcagggaatcttctcagttctttttggattcctttcctcactgtggaccaaaactgcctccagtcattaagtttggggaatcattaggctcacctagtttgttttccttcagtgtctaaaaaccatttgatgtgttttatccacttttctagttgtttatggcagaggacaattcctgcagcaattaatatttgatggccaagaactgaaagttcctggatgtaacaggttatttttcagaactccccaaaactggaagaaacgcattgaaaaatgtggaggggaaaaaaagtacagaggcatcttttgcataattatgtgtggaatatgatgctttttatactcattctgagaaatggtccttgaaagtaatcacttgccagtggaagtttgtagattgtccagagtttgtggtgcatgtgacaagttaagagtctgaaaggaagtatttcttttttattatcagaatctttgcttttaattgctttattcactaaagtggataacttagacctcagctacagttttcagttattatacatggaagcttaggaaacatcacgacttttactcttggagaaaataatttccaaatcctagacagatgactttcaattggaagatgcttttgaaagaaagactcattagagggagtttcaggattttgtctcctggttattgaaacttgtactgaaggtaaaaatccaatggatttacaactttgcaaatcttatatctgaaaaaaagaatccaacttttcctagaaagcccactatgaggagcaacaccatgttttcttcattcattcttccaaacgtgaaagtcatgaaggaatataggcactcctctcgatgagtgctttttaaatatttgaatgattttgcctgtgaatcagagataaggtgattccaaggcaattaattgtaggcaatatatagtctttttctagggtaggattgagcgagtaagtgagccatttgtgttgagcagtggtcctgccatgcctgctgacttggaatagtctgctccttgggtttctccaggataaatgtttatgtgtcagtctcagtacttctgcctttccagtatgattagagccatatgaaaaagcagtgctgagcagaggtagggtggtttctggtttttgtttgtttgattgatttggggttttcttttttaacttcaaccttcaaggttgaggtatggttccatttttcatggaagattaaccctatttgtgtagggtaaggtgtaattctggtttccttcccccacaccctttaaaaagcatactttaagcctctctcaacgcatcagaggatgattactgtgagaaggaatgttctcttttggtaatatggagggggacgcacgaaccgaacaaccagatgatccagtaaataggtaggtcaaatggaggtgactggactgggctcttcagttactcattcctggattttgttgacttcacacaccagagagaccagagaggttcactgttaagtggctttatttctgtttcttttagaatagatggataataattgaattgaccttggtttgtatattatttcaaaactctagttgagaagagttacagaaataatgcctgtgaattggcatatgggaaatagaatgttgctagataggtaagtaccactgaaaatgagattccacacttggtgtaactggcagattcatggtagttatcttctagaagtaagctaagagaatgaaacactgggtgacagtagcagaggccggcttctgattgaagattcccctgggagaagcatgaaggatacagccatccctagctcccagttatgttcctgacagctaccttagcagtcttggatccatgtttctatggaataacagaaggcaccttggtctccttagagcacgttggctaaagatttgatgactccacaggggaactgtagatctctgattaatggaaggctttgttaggatagaagtgtcttttaatgtgttggagacagaatctgtacatgaaaatgacaatggtaaatatgttgtgaaactataataaagccatatataaaagaaacatttttatcatttctcttaagggcttttaaaactgtataatgttttgtctttttaagtttatttagcaacttgtctccagcttgtgtaatcactgcaaaatcccccaagggggtgttaaacaaggacttttgtagcagtagaaagtcttgttcgattttccagatgaattttttaatttgaagtctgtaggttgtgcttttgatcttctttactttaaagagtacctggccttggagcctcactttgcatcattctgcacatgtacaatgtgtgtgtgtgtctctgtgggtgtccccacagcaaatgctgctgctttgagtgtgtctaggtaacaacataatcttatccccataatttatgtagggtaaaaattaaatctagaatctccaaagcccttttctggtttcataaaatttttcacatataatgaaaggtatcaaggtaaaaggcaggttttattagcatttgggtatgtttaatttagtaaattattttagcacgtttcttaactttccgtttaaaaatataaaatatgaactttctgaaaagatactagattaagctaaattgttttttacccatgggagttttggaatataatttaggaagaaaaatcccattaaggaaaagcacaccacggtcctacagctgactgtcatcttggccagcacattctctcaaagtgccagtttcttaacctgtaaacttaaaaggttggatgaagtcatctctaaaatctgatacagtgataaatttttcatttgattgcactttgttacatttgtttccagttaggaatagatagaaactcagaaattattttatacctgtcactaaattataaaaattacaagaattcattaacaatactaggagctctaaggcttttcttagtttcagatccctggaaacaaactgtgtagtaagtgaaataacattttttaagtatgtggtacatggtggttacatggtagttaaactctgcataggatccgtaatggattcatcttttgtgaaatgtagcaggcagttatagcagcatttcatacttgtcctgccttatgtatctttttaaagtttaattatcagtatgtgattattcacagcattttcaacctcagtacttctgatgtgctttacagaattgtgaaatatacacatagaagagtgtttgtaatgtctgtacattttaaacaataatagtgatgaaagaacaccattgtattcactaccaagttatgaaaaaaatttctgtagaacctttgaagttctctgctgctttctgaatatgtcatcctacctccagcctcccccacattacaattttgaagttaatcatacctttgcctttctttagttttatcacacatatatatgtatccctaaatgaatcattcattagttttgcttatttttgaactttctttttttctttttgaacctgacatgtgaacataagaaccttctatttgtaatctgtcatatgtattcttctgttacttgcttttttccttaatgttgttttttgagattcgcacttgttaatgtgtagctgtagttcatgatttttcactgcttaattgttttaatgtaccatattttatttagtctgttgtcagtgggcctttgcgtttctagcttgtacatttccttgttgttaggagccatgtaatgacatagaaaatccttttgcaatgttaccagaaagctagcaacttctcaaatatttagttcaatctttgttaggggcattatgctctctttgggaagaagtatttcaggggaaaataagtaaagttaatgttaagattcatatattgctactagataatgagaatttcacagcaaagtcattatctagaaaactgcagttcctgtgtcagagggaattgagtgcaagtcccatgaatgagggaatcaaagatttcattgtggaaattagaagcagatgcttctaagttggaggattttccctgagaacagcactttttgttggcgatgtcatgctagaaattcatcttggttgaaaggaatttttgtgcctggttgctaaacctgatatgacttttgaatacagatggctgtgaaagtagtttctgtggtttaaaattcatgaattttaccattgcctttgttcttgttggttgcctatctaacatcttctcttatcccccagcttcccataggtacccaaattttggttttaatgtccgtgtacttcaggggaagttaacacaccgccagatctagatgtgggccctaggtggcttaggctagttcaactattccctgcccctgttcagtgctgaaggacttgtgaactctccagtcaggtagagattcagtattcttgtttccttctacattctggttgatttggccactctgagagatgccagccttaagatggagctgatttcagggtgccaggagaaactaggttctgtgtatgacaatgtgagccaccacatcaaaccacctgtggggccacccatttcactttaggctccaagtcactctatttataaatttcgcttatttaactagtcctgttgtttactaatagttaacacttatctagtgcttaccatatgccttataataccctataaagtatgtactgttataatttccattttatagatacggaagctgagatagagaggtgaagagactttgtcaaaggtcatacagttagtattaataaatagctggctaagagtcagacccaggcagtttggcttcagagtccagatttgagttggatatttttggtacttgcaacttagtgcgtcccaaacagtgtgtctccttatgtgtttgctttcacataagttggcttaacctgacacacatggagacttttgcagaaattattttgtggacagtgttggaggatcgtattctcacattatgtccactaaatttggagacaagaagaaatgtacacatttcctctataactaatatgcagaaaatattcaagaagctctgaccaacgctgactcccattgtgggggaaaagtgtgtcgtaaaggaacataatttttaacttaattgctagggattcattcacatttctggtaagtctaaatagtgtatttaacaagtcctactggatacctatacagagccagtactaccctgggcattagtgacataaggatgctgacagcctacccttgaggagactccagtcctccatggggagcaggagaaaaactgctgagttgcctaggaacgtggaggcatgcttcacagaccagcatcttgagtttccagggagaatgaagatattttgtgatttcattatgttcttttggagtgggtgggtgggtgggataatatgcaagggataatattgtaggcagagggaacagcatggtcaaaagcatagaagtatgaaagcaagacttgttcagggatccgtgaggaaaagaactgcagtaattcagaacatgaattggaaaatactcacactgaggaggaatgggacccgatggtgaaggattactgtgctttagtgttaggtgttgtcctgtggatgtgctgaactgttaaagaatgtgagcaatggtgtgatatgtatgatcagatatgcaatttaagaggtcaccctggcagcattgtgggggatggctttaaggaatgagacaagacagagaacatttaaaaatttaggtgagaacacagtgaggttgtatagtagagaagaaagctgttaaaaaggctagacaaaaggaaggatttttttttcttactaagattatataaaaatatacacacgtgtatagatgtatatatttgctatatataatgcatactatatatgtatgatgcatattatatataatatatattatgcatatatataatgcatatgtagcatatagagagagagaacaaataatacagagagagcaaataattttcccaacctttcagtcattgaggatcactttcatttgtcgtttcccccaccttccttaggcttaatgtttggaaagattgtctgtcaaaacaaattaagtcatttgttttcttttttttttttttttttgctttggcatgtaaagctaagtgtgctatcaaaataagtgcctgaaaataatactaatattacttaagtgaaagatcttttaatttcccttgagatattattgtgggaaaatatgccatttctatcaggctttttgagatatttgaagatccccatcacttcttttatgggcttcattgtaatagttgattaacagaattatgcttattactgttcagtttaggaaggatataccagacctgtgctttggagaaatatgtttttaatctctaatgtaagacaagtgataatttcattttcccaagtacctattgtcattagcctttgctttgcctctgtaatcaaataaatagcgtgagtatggtggtagcagaaaataatgccaaagaagaagggggaagggttgagtccaaacagcacagggtgcaaaacctcggttaaagctagagaaggcgattcattggttgagttaacaaagaacaaaactttgaaaaacagtccgtggtgtactatgctgtgtgccatccaagtgaatcttgttggaagcctctcaggctttccaactgaagaaaagccttatatttcaggagaaggctctgtaaccaggcttctcatctgttcagtctgagtttgcatggggcagcagcacaggcccaggcctctccactagggcccttatctgtattacttcccacccttgcaattctttcttctccccatacatgctgttaacctcccttcatggaatctttcctgaatgccatgctcctcccagttctcagccttttctcaaatcccacagccttcattttactgtacagtttagcatttaatttaagatgtagttgcattacttcctattgtttctacgctattaattttgactcttgaaagagtataaactgtctaagggctaaaatttagaaatggtgttgagagacaaatatgtatgaactacactttaacaagtgctagagttctcaaataccagttggtttatgcttattcattgactaacagaatacttatgatctttttcttgctttttttttctctttgatttagcagctttctttattcctgctagtcctattctaaaattatatagtgaaagggtaatttttggctatagtgggtatttgtgatttaggggatgatgtgctcaataaacgtttattattattgatgttatttttttatatactatgatttactaatctgttcctgtcttttccctatttagatttttctcattttttactttgataaataacactttagtgagtacttttgttcagaaatgttgaatgctttgtttgaattatttcttatccattcgctgcaagtgggattattgggtgaaaaggtatgaacatctctatgactcttactacaaaaaaagccaaattggttgcagtgatttataatgctaaccacagcttatgattcgatttcactaatttttctctttattgcaatagaaagttctttgctggtctttttatattctcccttttctatagctgagtactacccacataatgtttttcgttagagtatgatgagcattacttggcaccaatgcaagtccactttaattggaaggttctttttttgttcctaaccccgaggttaacctcattggttaaatacagaagttaaataatctgttagctgccaacaggagaaaaacaccatttatttagatttcaagatatgataaaatagcatagatagtgaccactacatgtttgcaaacaacagtgcttccacttgctttccatgatatgaagccagttatgtttcttgctagtaaatacagtaacacatactgtatatcaagctctgttcaaagtgcttcacatatgagtaacccgtttaataaacttcacatgaatctcaattcaaaggtgagcaaaattgatcaaagaagtacagagacttgcccaagggtacccaggtgggaagtgtctgagcttgggttcaaacccaagctgtttggctccagagtccaagctcttaacagcctattatgctgcctactgccatacagtatttcctctttcaaaacttagcctttctgttgattcaacaactagcctgcatttcaagtgacatacacagccacttacaattgtatagtataataatgttacagtcagattacagtttcttagcttgcatttggtaattagcttaatggttttccccttaccaaatttataaaatatgcttcaaattaaagctatttttactaaaattgctatgattacactgtttactgatcaattttcaaattacatatcaaccatgctttccagttattttgtttgcagtaaaagcatttttttacagctactctaatttgttacaaatgtacaatacaataaaagcatattctgcgtgattctgtaaaacacattgtggtctttaataagaggactattcacccacacattagtatgcaagatgagatattcctttgttgctgaaaattactgttattaattgcccaatatgctttgtttgccttaaatgaattttgcattatttccataaattatttactgtgttagtgatttattttgaattattttctacttatatattccctgtaagtgggattattgggtgaaataataatttactattattttaacccaaccacctaaatttttcagctactcagattttatcccccatcttcttggtcttctctgcttatggtgaatagtgactattctcctttttttggattggagagaaactttaaaacttagagcagttttttgtttttttttttaagtaaagtaaatatcaatgttggtatagccagagataggaaacagtgaattaatgaatgaatgtatcaagcagtcagtcagcttcttgtttggattatctgtattagagaggacttactctgttgcaagtggcagaattaacataattagcttaagataacttgctggctcactatatgagaatttctatggatggtttctggcttcagatagctagatgcagcagttcaaatgatgcaatcaggattctttctgagcttctctttcctctgtgatgatgtccttctcaggagatttcttaccatgtggcatcaaagatgattgccagcaactccaggctcatattattttcacaaagagcaatacaaaaagaagagcagctctctccttcccagcgtttatatcacaaatttcatggaggaattctggttttgcttgggttacatgttcagcatttagaccaagcactgtggttggagaatgaaccctgtttggccagctgtgagttacatccctctcctacatcacccccatcagccagggtggggacaacacactgtgatcaatagccccactggaaagatggtgccaggcagactaaaacagatgtcctctaccttccattctttggtcagccagcacacatttcaacccatacacccatacgcactgtctttcagtacataaaatttcaaaggagtaaccacttaatataatgccacttttccatttacaaccaacaatacgcttaacttccctacccaaaagtagacttcttaaagtttagctcatttgctacatctggctccgaggcctagatctctgtatgagtgtatttttattaatcagttgtagatattccttctcatgacctggcaactcatgactagtttttattttttttatttttgagacagagccttgctctgttgctcaggctggagtgctgtggcacagtcattgctcactgcagcaatgacttgagcccatctcctgggctcaagtgatcctcctgcctcagcctcctgagtagctaggactacaggcatgtgccaccatgctcagctatttttttttttttaaacttttttagtagaaatggggtctcgctgtgtttcccagactggtctccaactcctaacctcaataaattttcctgcctcagcctctcaaggtgctgggattacagatgtgcgtcactgtgcttggctttgactcttgttttaatgaacaatctttcccacccaaataacctgatagctaatacttatatccattatctcatttaacccttccaataatcttaggcggccaatactacagatgttacagatgaagaatcagatttagaggtcaggtaacttaccgaaggtcacacagcaggtgttgtggaatccagattaagatccagatttgactgatttgagaaagggttatttaacccttaaatctatcttcttaatcagtaatctgtttgtattgtctctaaacatgaggttaagccatatcaaaggcgatcttagcctttccacagtgcctcatttatccaccagagcaatggttggaaggtaggaaagagacggcaacaaagaatctgatgttctttccagagtatttggctccagatggttgatagatgtcaactactttctttataggtaaaatggtaactgtaaaacaggccatgaaacagagtgttcagtttatctctcaccttaagtgagaaaagtaaatctgtggctcctaaatgttttgttttgtttttaaataaataaatgacccttaaaaaaaaaaaaaccctcatagtacagagtatgcaagcaaattaaaatagttgtttccaggtcagattttatattttcaggtactgttatcaaaataaaggactcttcaggaacaagcaggtggggattgtggaagtgtatttatgtgagaagtttggctgtatactgcagtaaatatttaagttttaagaagttaaacttcaaagctattccaaagccagaggccacacacattcaagaggttgaaaattgtctttaaagttcaagccagatttctgagtttagcactcagttgctaatctttagctggaaaatatgtatttagtaagaattgtattattaaataaaaaacagctggatggtaaaaagtagcccatagtgtctctatatggaaacctgtggagcactagttctcaaccatgggtaattttgcccccagagaacattctggaatgtctgagggcatttgggattgttacaactgatgggagaggggctcctggcagctagtgagtagaggccagggctgctgctgaacatcctacaatgtgcaggacagccccccaccaaaaagaatatttggcccaaaatgtcagtagtggcaagtttaaaaaacccttcagtagaatcttcatgtataggaagccaaacagctaacatttaatgagcatatactatgtgcctgtcattggagattaagcaaaatatgtagctagtgaagtgaccctcctctgagaagagctgagtagaggagacagacaactgaggagtacttacaaggagtattgcacaagtagattatccacacaaggaaaaacttcttactgagcatgagttagtcacagcaccagaccagatccagggagaggggaaatagatcccacctctgaatgggaagcatgagagtgagtttgcaggtttccttaacataccataagtacctaacagtgcctggaacatggtaagtttgtagtaaatgctagctatcattagcactattattttgccttttctgaacagtaagtgagtcttggcaaggaaaactcttgcctgggatagatggatggatggacagatggaaggaaattacatctctttcttcatttagatgtttccttaaatattgactcattagagatgcttcccttgattaccctatatgagatagcatccacaccacaaccatatctccatcaactctatcaagtactctgggcctatttttcttcatagtacatgtcaccatctatatcatatgcttattgtctgtttctattagagcagggtatttttgttagtgctgttagtgtactcagcacatacagcaacatttggcagacaggtgttgaatgaaagaatgaacaaaaacagaactcattttactaaagacattttgatatcacttttgggataggatactatacattaaagatgatacagtttattccagaatgatcttagctacagtattcatagcacagtatttgtgtacttaatactgttatccattatatcttcctttgaggttggcatgagagttgcccatcagagtatgtgtgctcttagaaatcgggacaatattatcgttttaagcttcttggcagtgtgatatgtccttaactagatggtgaactcatataggtggagggggagtatctaatgcttttgtattctgcttttcagcaaataaatattaccgtactgtgtgtgtaacacgagctgtataaatgtgtgatgattaaattagaagataggattctctacaatccagttttccaagataaatttttgccttgtttttgttaggtgatgaagataccatattgactgttgatacatgcctacttagtcatgcttcgcttacagtaatcttaacaaattaccagctttttactttttaagagacagtcctagaattgaaaatcctcctttgcctacattcaatatgagactatattatgtgggtaggaaacttctggtgacctacttttaattttaaaattaaaaaaatacttaccttagttttagattcagaaaacagttgcaaaggtggtatagagagtttctgtataccacaccggcacccagtttcccctgttgctaacatcttacatgattatggtatatttgtcacaactaacaaatcagtattgatacattataacaaaactgcatacttttaggggtagtggacccagttttaaagcttttttcccacaatttgttaaaaatgacaatcagtattgaatgcccatgggtggtggcttcctgattcttaaaagaaatggaataattttgtaaccattgggacttatcaggaaataaggagcttataataatgtgcacttaaagttccagtgggggaattgtatagctcaacatattgtttttgtaagttggatattaataaataaagaggctgggtggggtttgatcactattaaaactgattttttttttgttccctggaaaatatgttactaccacatggtctacccttcgaagataatagatcctaagatcattggacaggaaagggttgccctgtagtaagaaatgtgtcctcctgggactgagttgagatttagtttaggatacaaaataagtagccaatggctgttgtgaggctgacttctaaaattcaaattggtataaatttaatctaattcttttccccaggactgcccaatttaagattaagttttatactggtgcatattagagatatggctattttgccatttcattggagccttttaatcagctttaatgctgtcttgggtaaagtaaaaacttaaactctttctttaagggcttttctagtttgccatcctcaaagcagaaaaagcagcaatgaagcagtgctgcttcgtatcgactctgcttttattacatttgcttcaataatcctcttccagtcatcttctgtgctgcatatttgagccataaaataagcaaaaattgtacccaaatgaaaatttcaagttattttaatgaagctctggaaacatcccacagctcagaagatatttttttctagtttattttttaaattctggaaagtaggtcagtagacataccctgctttaattggtttaattagaagtgaaaaattataggactaactcaatttgaagtacagatttaaataagaattacactgggatgaatattacttaagggtttgaatttaagatgcatttaatcaaagcttataatttcttcttgaaaagatttatattgcaaaaaggaagactaagtgttggaatatatcaatatataggggaaaattttgtcatgaaatataatatttgataaaatcattttagaattgtatctctaaatggtatgcctaagaatattgttctataggaccttaatagatatgccttgggggaaaaaagtattgtgtgcccaagtaagtttgagatatactgcattaaatataagaagttgcctgcaacacttctcagagcctttaacactttctgatttctaagagaggacatatatagggtacagtactttgcaaacctatttatccctgtaccacctagtaacatttttcaggaaaatgttttgagcacacaaatttgacctgttttaggaattcatacctttgacaatgttgaggaccttttttttctattataaagatgatgtgatattcacctatattactttttcccaattctctatctttaagatatttttccaatgtattatattcaaccctctgctcagtcccttccttctgctaagtaaagtggtggtttccatctgttgctacacatcagaaatacctagctctgaccctggagattctgtatgaatagaaatgccagaatacctgctcaggattctgtgttcattacaaacacccaggtgattctgatgcagccaaccctggtcctccaactgatgctttggaattgttgaaggaaaagcatgcgtgttttttttttttcaagatggatgagtagcttggggcatagtttgtggtcctagaacacatgggttaaccatccatcctagtgagaacgatagcacaggcctccaatgaccccatgaggtgatgtactggctataacctaacatgagatgattattattaagaaaagcagaatacttctaaatgggcttttagccaccttcctaataatgaagtaccgtatatatgattaccatttgttttagtttcgagtaattcccttgtaaatgatgttttatttattctttaagaagaatactagattatattttctaaatgtgccaagtatctaagaatatattctttcccctcctgctgataagagttatacatttaaccttaagcaaatcggccaagattctatttcatttatgctttgatttatgtgagtattaatgtattttctgtgaaaattgtatggttatatatactctccacctagtaaaacagttccatattcctggaaatagtcttttacgtcctacaaatgtagctggaaaggaataatataaatactaatggtttgacagacgactagtcttgacttgtcttggttgaatagtgttctattagcaacaatatatgaaatactagacacacccattaaaagtagaaaatacccactactgttttaaaattattctgcaagatctcactaatgcaatgagacataaaacagaaataatgggtgtaattattgaaaattggagataaaatttctattacttgcaaacaaaattctctatgtcaaaaacctgataagttaaacaatacagttaatatgtttaatagaactaattagatatgagaggcatccaaaatccattttttctatacaaacatggtttgatatatacagtcttgttttatctgtgtattaattggcttatgaaataatagaaaaatcaagtatgcattattaggttaaagaagcaggagagacagagctataaaaactaagaagaatgttgtaaggagggcttagcaaccaggataaatgttgtagagagatcaattaaagtgatggcctagagatcatgggcttcctttggcagagccatgttggtgaagtgaaggaagtgtaagccagaccacagtggttgaagaatgaatgtaatgtaagagccaagacatttatttgagtttgatagttatgaaaaagaacgagaattttcttattgctgttgtttttgccatttcatgttcaaaaccctttatctcccatgtgggactgaaaactcctccaagacaggatctctgtttctgtgaggcctgtagtacttagtacatccttgaatgtgtgaggctctcattggttataagtttaattcctgactgtggatgaaagctttaaaactttgtgggcaaaatacagaatgaatttcagtgagttcccatgtattaaataaggtggtgctggctggagatatgctgtccctgtgcccacaatagtagtggtgctgtgcttatcttcctgacgcgctcttcgcagtcttcaccgcctttcttcaggagtctcccctttggctttttcacagctatgaaacccacgtagtcgaacaccgtgatgcttctcctgcagggcgtgtgatgaggaggcgagcttggctttggagtgctgggaacctgaggaattgccaaggacccagagcccagccctgaccaccagagtgcccaaaacacaatgaacaaattgaattttcataacaacagagtcatgcaagaccgccgcagtgtgtgcattttccttcccaacgatgaatctctgaacatcatcataaatgtgagtagatccagttttagaaatgtctaaatattgtgttttcaccagtggccacattcaacttatgacttgattaagggtgaaatctttacagaattagggcagtaatcatgtggcagaattgggttgtcaaatagtccatacatacattaacttagctttgtggcttgtgtgcagctgccttcaacattctctcacctgggttagaattagaggactatggttactatattgaaaaacaaacatttgctatttttaaacttttgatcgaaatataacttttattgaagtatatgaatttatgtcttaaatgcttagagttgtcacccacacacatgaaatggtaatcatcgctattaggttggtgcaaaagtaattgtggctttcgccattgaaagtagtatcaaagactacaattacttttgcaccaacctagatagttttttttgttttttgtttttgctttttgagacagagtctcactctgtcacccaggctggagtgtagtggcatgatctcagctcactgcaacctctgcctcctgggttcaagcgattctcctgcctcagcctgccgagtagctgggattactggcacgcaccaccacgcccggctaattttttatattttagtagcgacggggtttcaccatattggccaggctggtctcgaactcctgacctcaggtgatccgcgtcagcctcccatagtgctgggattacaggcgtgagccaccgcgcccagccttagatagctttttaatatgcatcttgattttatcttaagagtagccaaaatctagccaatttccaggactaggtgcctataggctgaacatttgagcactaagctgttgcttatggtttgtgagtcatagtcagcttgcttagataacctgaacattgaggaatgtgatttttttttaactttaaaaaaattgagttataatttacatactgcaaagtatagaaaccttatgtgtgcagctcaatgaatgtttacaattgtatacatccatgtaaccatcactgtttgagatataaaacatttccagcaccctagaaaggtcctttgtgacccctcctagtcaatatccttcacctaaagggtaaaaactattctgatctcttgtcaccaaagttttgcttgtttcttaacttcatgaagctgaagttatgtgatatattctcttctggcttcttttactcaacatttgtcctgtgaaatttattcatgtgaatccatgtgacaataattctttcttttacattgttgtgtgatattccattgtacgaatacacccaatctattcatctactgttgatggatagatattgagttttgggctattgtaaaactgttatgaacatgttatgtgtatgcacatgtagaaatatttcttggtttatactgaagagtaattgtgaatcataggttacactatgtttagccttggtagagactgccaaacaattttatggtaatcagtgtcatgcctaagatttttcaacccctctctgtgttatcaactttcatactgtttctttcatagattgtattctgatggaattagaggaaaaaattgccttagtgcatgacttgaattagtttcctatatgttactatatttttatttatttattttgattttgattttttttttttttttttttttttgagtcagagtctttctctgctgtccaggctgcagtgcagtggtacaatcttggctcactgcagtctctgccttccagcttcaagcgattctcctgcctcagcctcccgagtagctgggactacaggtgcctgccaccacacctggctaatttttgtaattttagtagagatggggtttcaccatgttggccaggctggtctcaaactcctgacctcacgtgatctgtctgcctcagcctcccaaagtgctaggattacaggcgtgagccattgtgcctggctatgttactatatttttaatccaattgctatataaaagaatatttctaaatattatgctgaaatatatgacatttaaataacttcattaaaaagtttagctaagaaaagtttctgcttattgctatagtcattttggctttattctgacaatcaacccaatttcttaatttactgctgtatcctcatttttgcttctagggattgtctgaggatccaacaggcctgcctattggatgaactttgtcatcttttgggcagaatttccaatgattagctacattgctgctcagggtaactgaaattgtttttggatgtgtgaagtggtgggctactattttgacagcatttggttttttaaactgaataaaaatcgacaatgtgtctcttttttcagtgggggcactagcaatataagttataattgaatcctacttacatatgtgaatattttgttttactttttatacagttatataaaagatatccaataatttttaaaaatatacataatctaggacatatagcataagcacttaagaaacttctctcactttcatttgtctttttacgtggtgcaatgtgtgtgtgtgtgtgtgtgtgtacacacacaagcaggttgtggaacaacaccttaccacatttaagtgaagggaaggctaatctgacagtgaagaatactgaaagctgactataattttcaaataaattaatttatactaaaatctcagctgaggaagatagttatagagaacagactggaagatagctagttcatttgttcctatggatcagtggttttgaaacttgaatatatatcagaattatttggagcagcttactaatattcagattgtgtagtctatggccatactaccctgaatgttgcctgatctcatgtgatctcaaaagctaggcagggtcaggcctggttagtacttggatgagagaaatgccgatgtagtgagtctgaggcaggatgcaagcatctgccctaaatagatgctatagatactctaaaatttgagcgaaacaggcaaagatctatgtgccagcaccacctagtttctttcactctctggaattctggttactcgattgtgtttcaacttgcccagtacctggtacctagtgggtactgaatttgtattagcttcatttctgtcttccctctatagaataatcgaagagtagtatggaagtgaaaacacatggatatacttaaaacacacagacctgaattcaaatctcatatctgaatgactttgggaaagttaattatacctcttccagcctcaacatcttcacctttaaaatgagaataatacttacgctgcagggtgattgtgagaatttaggattaacactcagcataatttctgatgcatatataatagctgctattatcattttaatccctaggcagagataaattatactttttcaactcttctcttttacagtgttagtatgataatctctctaacatggttaggactatgatcatggactgtgaggtcatatatcacgattaaggtgggttttggagtcacaggtacctgggttgaaatccctactccacaactttgcaatctagggcaaattttctagttgttttgttttgttgctttggtttcctcatttgtgaagtagggataatcttaccctctgcacagggacattgcaaggatttaaagatgtcacatgcatgaagtattcagtgaagtgcctgcatatgtgaattgctcagtaagtgaacccttgagtgtcagtttactttttagttccttgaactgtttgttcatttcattagtgtactctgttaataaaccaagatgaagagtctgaatcccatgtaggcctgcaagatttcttatttcagggcaggtctaaggtaggacacaagcatgtagactcactatgcccaaactcctctccagtaagcggttggaccaaagaagggactaggttacgtaggatggaggcttccccactaccagaaaaacaattcatggctgccaagaggccctccctttttacaaagtgttatctttgtgttcagaaaatagcagtcaatgtgtatagagtttgagtgtaataaattaactgtagcaaaaacgattttattaactaattttttcataatttctctctctataacaatgaaagtttgttccctgacaggtgtggttgatagaatgttgcctttttgcatatggaataaatttagtgttttggtcattctgaattccctgtgagttgcattaatagaagctattttaaatgattttaatcatcaggcaaatatggaagctttggacaattttggaagtaaaaccattgtaaatgtaggagccataaagatttgagtgaagtaattgtggccacgagcttatatgtcttcactaagattaagcaattctttttttctagagtatattttaaacattcctgcacaataacaaaccattaacatttaggatcacatactattttaatttaaaagtccatatagaggctgggtgaggtggctaacacctgtaatcccagcattttgggtggctgaggcaggagaatcatttgaggttaggagattgagaccaggctgggcaacatagtgagacccctgtctctacataaaatttaaaaattagccaggcatggtggcactgccagtggtcctagctacttggaaggcagaggtagcaggattgctttagcctgagaggttgaggctgcaatgagttgtgatcgtgccactgcactccaggttgggcaacggagtgagaccttgtctcaagggaaaaaaaatagtccatatagagtatatttttagataaagctttaattcttattcttaatacctcatactatatagcactttttaacattcccattgctcctgaagattaaagaacttgagaaattttacagtcagctaaaatgtagccttaaagactcataatatgcaaatacagaaaactcaagcttattttcacagcaggcaagacttcagagccatggccttatttaattatagtttttgaataagagcactgcttacttgatatttgttaaagagctttaccagtaggcttcaaatacttgatttaaactagcagaacaataataaatgtatgggctgcatggaggaaatatataacgttatttggtctacagtcacacgagcctaaaacagtttatttcctatacatttagtttgtggtttggaattttaacttcttatggcattttatcttggctgccttgtacccaacgtttttaaatacagtcaaactaaggattaaaggtgctgtaaacaacatgacattttaagtcacaaatttgtagtatatagttcaacttaagaattttatgtgataattgatgtgttctcctcttctttatcattgtttaagtttatttgtaaggtagaattacgatgataatggaactcaaaatccagaggccttttaaagtgagtgttggaaatgacataggacttctataggacagaaatctagaatgtcaggtgattcaacctagctgtacacaaagagaatgataatgattccccattggcaaatgtgttctccagtggtggtggtgggtgggtttgcatttatacagttttcctaaaatgctgaatggcatatttataaaatggtttgctcagtaattcagggagtggtcttgatctctagtcatggaacagaatgaaggtgagcaggagcccacagggaatcagattcctgcctttcattcatcgaacatttactgagtgcctactatagatcctgaatgtaaaataagacactgttcctgcatgagttcctggtacttccaagcagctcacttggtgctactttggtcttaaatatcttctgctctttccagtgggtaagatactttaggttggttgctatttaataatgaatgtggaaaagagcagtaaacccattcttcttactacagtcggaattatcaccagttctgaattgtttactttcaaatttcaagggatcttggcgtgtctttattttcctaatctgagtttcatattaagatatgataaagtcattaattcagagttaatttttagaatttataataacttaaactcattatcattgaaaaaaaggatttgaaagcagatagtactaataaaaggggagaatgccatatgtaatgcatataggtaaaatgataaactgtcatgttacaatattttaatatatatatttaataattaaggtattttaatacacaaataagctgtgagttgctgcctttgccactattagtgatatgactttaagctttctgagttttattttcagaaaataaattgacctgggtggtttcttaaactctatccaaactctaataaaccttgatgattctgaagtcaacaagatagaatcagcagaattactgtcctccataatactactttaaacatttgagaaagcattattatgagataataattattatttgtaataataatacaaatattatttgtatgagttattatttataataataatattgagaaagaaaattgtatcttttaaagactatcagttaacttttgacttgtcagaataacttattgccagagttccaaattaatatggctttgtgattgaagtatactaagactcagaaaaggaatctggtttaggcactaaaaatatattagacaaaataacagtgataaattaaaagctaggcaggctgggcatggtgtctcatccctgtaatcccagcgctttgggaggccaagatgggaggattgcttgaggtcaggagttttaagaccagcccaggcaacgtagtgagagaccctgtctctacaaaaaaaaaaaaaagtcgattgagactctgtctttaaaaaaaagtctagaccaactcgttgtacagtagatgagtttttggggtagactattaagaggaaagctttccttgaaaggatacttgtcctgagtagacgtccctcaaaagaagatacacccatgaccaataggcttatgaaaaaatgctcggcatcactaaatagcagggaaatgtgacatctcacacctgttagaatggctattatcaaaaagacaaaagataacaagtgttgacgaggatgtggagaaaagggaacccttgtacactgttgctgggaatgtaaattagtacagacattatggaaagcagtatgggggttcctcaaaatattaaacatagtactaccatatgatcctggaaccccattcctgggtatgtacccaaaggagatgaaatcattatgtcaaagagacatctgcactcccatgtatattgcagtattattcataacagtcaaggtatggaatcaacctaagtgtgcaccagtggataaatggataaagaaaatgtggcacatacacacagtggaacacaattcagcctttaaaaagaaggaaatcatgtcatttgcaataacggatgaacctggaggatgttaggtttaatgaaataagccaggcacagaaagacaaaccctgcataatctaaaaaagtctgactcagggaagcagagaatagaatgatggttacctgagactgaggagttagggggactggggagatattagtaaaaaaatacaatatttcagttaggaggaataagttcaagagatttattgtacaacgtggtgactgtagttaatgatgatgtatacttgaaaatgctaagaataaattttaagtgttctcaccacaaaaagatacatatgtgacataatgcatatgttagtctgatttattcattccacagtatatacatatatcaaaacattatgttgtataccataaatatatacaattttattagtcaattaaaaaaacaaatgaataaaaattttttaaaaaagatacttgccaaataaatatttttagtaatctgagtaggctatgctgcttactttctgaaactcatttatcatttatcatgcaccatggtttcagagctttgtccatgtatggtaagatctgtgagtcttgtactttattaccatgttgtaaaaactggtactgtgatcatcattactgaaacacaaccccaggttaaagtgatttggataaagcagcagttgttttctactgtcagcttgtcctttcaaggaatatatttacgatgcattaaattgcctgattgtggctccctgggtggacttagttgaattgttattttacgtcgtgcctttttcccctacaggttaagattctgtgtcaccagttgctggtccaggtttgtgacctgctcaggctaaaggactgccacctctttggactcagtgttatacaaagtaagtcttagagccctctctgatggatttagccaactatccctgaggaaatgacatcttatagctataacttaaattgggcctattgttataaaactgtgattgtcaaaatacccatggactgattttcatttttagtgtaggtgtagtatttaattttttaatctcaatttctatgtattttttacaatatttaggattttaggcatttatttattatagtttgaacttaaaaattgattcctctttgggaatctagattctatgtgtttgctcttccatgttttaatgaagcaagcttgatttttgtttccttgcattcagggagcagctggaatacttaggaaagtaatttaatttgttttataatttttgacattaaactgacttctcttttcaagttatcttgctattaactatatagtatcacaaagtaattattaatttaatcttattttttatttttctctcgtaccccttctcttttttccagtcagactatatgacttggaaatatcgggtcagtttcttctatattctttgtgaggagaagatttttaagtaaaggacttcatataagctttcttctctcataacaccttagttagagttaaatttctgggacttctctaaagccatttattataagctttcttccttcaaatgatatttttaaatttctctaatttagtcttctatatatctttgctcattttgtcaagaagagttttttttggtgcggtgtatttaattctaattcttgaatatggtttattttctactgctggaattggtttaaatttcaaggcttaagatatcttggaaatctggtcaatacaataatatgtttacacctgccaagttggaaaggatatcagtataaagttggtcagctgataaacaaggcccctttcccccaaaatgtagactgttttcagttgcctttttaggagaggctaaagagcatggagcagggaacacatcaggaccttgtgaatcagccatttgctcttcagtttcttcctgtggtagttaaaacaataaaacacagttgctaagctccatccttgtgttagtgcatacttcagtcgttctttcagggaagagtctgagagccataagaggctctatagattctaagtaacttttagtattccatgctcaaagttaattcttcttacaacaactactgctagatccttattgttcaacaaataagtccaataaaaccagtttatagcttccttaggtttcaaaataatttttaagatgtcctttttaaaaaagagatagtagtatggcgaaagaacattgaaacaggaattggttgacctggttctaattccggttgcacccctaactagcacttgacttctctcaatgtcagttttttcgcgtcaaatggaaattactactccaccagctttgcaggattaatgtgctttgagaattcttaaggtataaagctctggtcagattgtaggtggcagaggtatagtggcagtttaaaaatatatatatgtactattatggtgaacagtcttaattctattcattatgttgcttctttaggtgggaactcaagccaaacacaaatcagtttcgacaggaagattgtctggtcttgtttatttcatgtttaatcagtgatatgagagatgggagatagtgttagttgacctaataactggatttaagtagcattcctttttttgtctctgggatctcttttctaaccctttcattaaaattggttaacttaatgtcgtttataaccaacgagtaactttacccttcctattttcttctggcatttttccagtcaagtcccagtattcagcttggagtcaaagtgtagcaaagtgtgcacatctttggagtagtcaaagagacacacttccagaacaggtacatttttatgcagagctttccgtgaagatgtctccttagtgatagttagaataaaaggagtttaaaaaagacttgaaactttgtacagtataggaatgccaaagacttcttttgtgaaatagctctctcttttaaaagattatctttgggaaatatgaaaacgtttgttttctaccagcttcttttcacgtgtttagatcactttaacataggttttagcggtcttattttctgttcaccttatgagcatcatcccctggaagggatgttttggcatccatacttgtttttcataaaatgtttcttctcttttccatgaaattgatcccaaaggcagtgcgagtaagggtttatcattttgtcatgctgtgttttgctgtgtgtggaacacggacaagaaatagtcttaaagattagtcttcacaaaatgtgggtcagacttctcacttggaaatgagctgataccgtgttttctaatttcttacatagcaattaagatagtgtttctgccctgctttattattttgtacctataagagcaggcttctttgagctgaacaaaagcatgttttcctaagactaacacccacagtgttagaagttagactgtaagtcataatgaccctagaaactaagaaaaagcagaagttggaatctaagatttcttctaaatattatatactttaatagtatgtgttctgtattgcaaaagcaaaataattcacaagtatctcattaatgtctagttcacagaaccttttgtcttctagtatctctttgggttttctagtatgtgcattcagactacattcacaagtcttgaggctttaaaagaaacttgtttctttctatattttttttcttttaaaaatcctttctttagcatgtcgtctccttttttttaatgtacagataatgaacatgtgtatatggagttgtcacaaaagctttacaaatattgtccaaaagaatggaagaaagaggccagcaaggtacgacaatacgaagtcacttgggtgagattacatttataagcaaaattattttgattttttttaaaaaatgtttattttagctgttatacattagaagaaaactgtaagcaatactttatgtactatactatattttctactttatctactaagttatatatagtatatgtatagtatatatatatatacactttagaacttataattttcttttcccattttctatatatgctgagtatatatatagtagtatatatacttagtatatatatatagtaatatgtatagtagtatatatagaaaatgggaaaataaaattataagttctaaaatgtatatatatatatacttagtatatatagaaaatgggaaaagaaaattataagttctaaagtgtatatatatacttagtatatatagtagaaaatatagtatagtatataaagtatatatagtatatatacttagtatatataaaaaatgggaaaagaaacttataagttctaaagtgtcacattaatcaagtattaatagcttatagaaaataataaatagaatctggattatctgttaaataatgttggataataactttagtaatcttggaataatgcttttaaatgaaaagtatggaaaaattatttgctcttcttttttggctatgctaggtgtcaaaattgctgttctagaagttattactaatttttaaatctacttttactgtacttgcatttgatgctttgtccattcattgtactggtgctttatttcacaaacattaatttcatttacatgagagaacattaatagggaattcacctcgtgtttccagaacctccctagtaagtcaggaatagtaatcctagatcctctaatttgtatttaagaagtcttggagtaaactagaaggctacttcaaagccagctgcaaagtaaagaacatgaatgtctaaataaacaaacagcatattagaatttggtatgtggaatgtcagaggaacaagagaacatttgtaataaggagcaaatggtcaccacagggaacagagctgagcgaggagctgggtctcagctagaaatttccactggcatttatttttatcttcccttatgttgtcattggcattacagtgaatgaaaatcagatagaaggatggtgccctgtttcgctttataacttcctaattgtatatgaacctggtatctatataggacaactgtctacctactacaagcccctactcattataagtaaataaaacctatcagtgatcaaaaagtatcttgcaaataattgtattttggttgcttttgaaacccattttcaaagtaactagaaatagcttgatttttgtgtgtgcttttgtttctagggtatcgaccaatttgggcctcctatgatcatccacttccgtgtgcagtactatgtggaaaatggcagattgatcaggtaagaggacagggggtgattctaaacgcttttttttcccccatagcactttttctaacataccaaataagttacgtgtgtttattctttgtcttcacctttaggatataaactctgtaggagcagcaatttttttctttttaatattttgtacgctggtatatcctcagtccctaaaacagagatacaataggcattcagtaaatatttgttaaatgaaagaatgttagactgttgataaaaatattaacagtatctattggcccacattttctccactccacgttttcataaccaaatcagtctccaaaaagatacttatttcaagaagaaactagcacttttgtaaagagtgaggaggttgattaaaagattatgttcttttccagtggtaaggtgggagtgggtcagaggcaggaactctcctataaaagtggatgggtgtttatataatcggttttcttttcatgtttggggtcttgtttatattcttggcagtagccttaaaaccaagattaagcccagtgaagctatcctatcagaatcttagatgcaatttgacaagggcaggtaattgattctttttctggaggtgtgtgcatgaacagtagtaggctcaggatgcaaattcagaattcaccatttcagaagctcggtctgtataggaggattcagtgctagaaaactttcagaagtgatttcttggccgatagaaaatactagaaatatgaactctgttttgcttatatatttttaaactttgagaagttccatgtgaaagaaacaaaatacatatggctagtgagttatatgtaaaattagctcttgatatttttatcaatgccagatgcaaattaaaaagtaaaaaaattagcccataaggattttttttaaaaaaggctaagacactttattagttatccttagtttacatacaatttttacttattttacctggtaagtgtggcatgacctggaaagaaggaatatatatatttaacaaatagttaaccccctggggctaagttttaatgcatccctatacttctgcccctttttcccaggcatgaaccagtccaaaccatctgtggttggcattataaacaaaagtgctctgaaaagtactctgtcctaaggggggaaaatttacataaatgctttatttttaagctctttctacttaaccatggtcttagtttaaataaacccatatgtgtttattgttatctgctaatgacatcagctatgaatctcaggtaaacattcaacctgaaataatgtagaggcaaatgagctcattaaaatatgtacacacacatttttactttgatcacaaaagcatcctatttgccagtaaatattttttggagcttttaccatgttttccccagtcagcatttcttaacgtatttaatgatgactgtatttatttctgatctcaagagattgtaatgagtgctctgttagtatttccttttgtggggagtataataattgtcgtgacatgtgcctgtaaaaacataacagtaatgtaacattcacttcaaaaaaatccccaaaaaaagatttaaggaaagcattcattgcatttcttcttggagaagtttaaaaaacggaaaagaaacctttgttaagcaaatttttttccagaagagtatatatgcaaatacttataaagggccttagagtatttgtagtgtgttcagttaaaaaataataaaaagaacagcaaaacactgaagcaggattgctcctcagatttttccttatttatgtcacgtgtgtagcatcattgtagcaacattagtacagacaacacatgtctagtttctattctaatacttgttcagtgaaatatttaccattttagagtggaatgattcagacctttttcttctctgaatgaatcaaatgctgtaagccttaggaaacgttatttttattgtctggatagtctgatttggggttctgaccccctgcaacctcagtgaggcagctatcagatattagctacaaccgcttccttttcagtgaggtgggagggaggagcagaaacagaagggttcctgtcaccagatggagagaaggatttgggttctgtttacatgtcattggattattccatcaaaatgtgagttctgttttcttttatttttctagtgacagagcagcaagatactattattactggcacctgagaaaacaagttcttcattctcagtgtgtgctccgagaggaggcctacttcctgctggcagcctttgccctgcaggctgatcttgggaacttcaaaaggaataagcactatggaaaatacttcgagccagaggcttacttcccatcttgggtaagcactgttttcaaattcgaaagagtgttttctctcgggcatttctagttcgtagtgttgctactcatactctttaagaaatgggaacacagatgttctgtggccaaattctttgtgatgcccagatatttaatgcttaagaacgtggtgcacatcatgtcttcatgtacttagtctgcttatggtgagtggggtagagaattgccatccatcctgataatacagtggagcttggaatttaccagcctcctttcagcattgacatgcccttgaccttcttgcctactcttaccgaagcagtattttctccctttgaaggcagaaaaacataactctttaaaaagtaagattattcctcgctttcctttgctgcgagaacaagtatgtcaacttctggctccggcctccatgtcctccactctcggggaggaactaaccccttctttcagcaagaaaatgtgggttattccaacgtgaactgtctcagctgcgctttctccactccaccctgtctgtttctcttcccgtccttcctccatgtctaggctgtattttctgtctctcttctatatcattagcccctccccaaagtaactcttcttcagtgagaacatgcaaaacatgtttggttctcacccacccatccttgagaaagaaagtggggagggaaagaagagctactactcttgcctttccttctcagtaaagcatcttgaagaggtagtgtgtatttgattttttcagcttctttacttcccacaagtgttcctcaagccatttccatctgccttctttccccatcagtccactcatggtgctgcctgttaggttgctttatatcaatacagtaaagaagtaaaaaattaaatatgcactacttttgctttatattgacaccagttgctttatattaacatatccagcagactcttttcactaaattttgctgctgtacctgacacttaactactcacatcttgggagatctcatccaaattaatgcttttaacgatcacctatgtgaaggcaagtcccaaatctggttttttcccctatatccataaggtagctgtttacccataggccgttcaaactcaagatgtcctaaatcaaattcattttcttgccacctcatttctacgtattcctacctctgagtacgtgggagtcatacggaactctgccttatcaccattccttctccctgtcctgtcccatcaactgtaacaccttgtaatgtctgtgcttgaataccaatcacccagcttaagaaataaaattatcttctatttttattgccattagccttcctaaatgtccattgcctcctctccctgtcttagctcctgctgtttctaggttcgtgttctcagcagcactgttgcagaaacttgtccctgcttcggtctttactccacagcttgcagatgagatgattttgcttctgacttaaactttcagggcctcctctgtcacctgtggagtgaagctcaggctcccatgcataacctagaaactctccagattatagtccctgccagccattccagcttcctttctggttgtcctgcaccttgaactttaggctctggcaacatccagccattggtgtgtctccatacttactgtggtgtttcatgcttcaggtctttcttcttgcagttcctttagccagtgaagcccctctctgtttcacctggctaactcctactcatcctccgagactcagcccaggtgtcgctccttctgggcagaccatctaggtgcccagtgctcaagaagaacctgggaatagtgttttacatcttattttaaaatgatttatttcttgctcccagtaaactgtttcttagtgtgttctgaaagacgggcataaccttaaccttttctatttcatcagctcttcatattgaggtactcagtaattttttgttgtgtgacttagagtgcttcatttttttggagagaaatcacaatgtctgtcaaactattgctgtctgtagcatgtttgcattctctggttgtcatcaggtgctcattgaatattgattattgaaatccagttagtatgccagggcaaccagtgtgctgagatatcagtttcccccacccttgggatcaccaaagccatctgctttagtgcccttacaaatactgttttcagtgtgcttttgacctgaaaaaaaggttgataaataactgatttaactgattaccatgtgaaaagaacctggaaagaaaaatctgtgtaacttgagttcttagcagaacttgacaactgactattaattcatcatatttaattctctgtaaaatattcaataggaagaaacaaaatgtcaatataaagacattttaaaaccaaaaagtctgtaatttttaaattttgattattttaagcacgactcttgctcacattgcataattctttccatctgttaagttccttatggaatcagctaagactttaatcaacacctttctcttagcctgcagctgctggatactatatatttgacatctgaaagcccagagtactgtctgatgaaaatctaagtcacagtgaatcacaatgagtgtttgaatgaaacggttttctcataagtattccagcagtgttcatatcagcctcttatgcaagaaccaaaaatgttttagagaatttctcccagtaccctgccttcttttgattaacatttagaacctcccagtctgtggctgaaattttcttaagagttaggtaggatccagaacctgaagatgtgcctactatagatgtatttcatggtaccaagtataaacttgcaagtataaacaattatgtgtacaaaattatgaaagtttgtgtagtgtttttctcttggtgactttaaagcaaagataacttatttttcctatttgttgtgatttttcttcttaggtattcagcagtacaactaaattgactctatagcttctagtattagctgatttagcctagtaacataacagatggtgaaaacagaatgaattttcaatgcaaaccaaccagtttacatggcctattttagcttctcattctttcatcattttgggggtgggggtagaacttacatctctccaacaaatgttgcattgcacaccccttgtatcccaacaggttgtttccaagagggggaaggactacatcctgaagcacattccaaacatgcacaaagatcagtttgcactaacagcttccgaagctcatcttaaatatatcaaagaggctgtccgactggatgacgtcgctgttcattactacagattgtataaggtatgaaacggcaactaagtcttcagcttctgagaaaaaaacatcttctcaataggattgagaaggaaaaccgaaggatttcatttccattaaaacttatttcattttttacatgcttttaaaagagtttcattgaactgctttttgttatcgcacgtcagtcttggaggccatggtgcttttactctggcctggaagcggggtggagtattttttaatggttctaatagtgagatgacaattggctataagatgttaatctgacttttttagtgattatggcattgttatttctctcctccccaaatctgcttttctgctttggggaatagcatttgcaacttctttgataagtaatttttaatattcctcaaagtgaagctatacctgcgttgtatccgtcagttacaagaacattaccacaacaggtaatgtttatggagtcctgtgtttactgggcacactttatatgtgttttttttaatcctcataactttatatgaaaggtactttaatctttattttacagtccaggaaactgaggcttaaagagattaaatgaatcacctaagatcacaaaactaaatggcaaagccaggatttagtcaaggccttcttgataacataggctgtgagcctaaggcactgtattccacacgttcctcactctcggaagttactctcctttgtgtcccgtgtatctctagcctcgtttttcctttctggggcagaggtcacacacccaaataacaactggggccatgctctgcagggaatcactcacagtactctatatcatcttgtcttctcttcccctcctcctcctaacccctttcactattccataagtgccactttgttggcaagaactcctgaatacccacttaagtattcaaaggtgtattctcaaaccaaatggatgaagtggttaagagcactgtaagttgagcctaactgcctaggattgaatctcagtttggcctcttactatgtgacctcaggcaagttacttacttaaccgctctgtacttcagtttccccatagttaaaggggacagcaacatacctgctttttaggattgctgaatactaaaggaattgttggatgaaaaactgcttaaaacagtgcccagcacatgttaagcatgatgttaagttggctgctgttaccattaccattgatagtattatgcttgttatctctactttgccttttgtggtaggattagcatagctagaccattggaaactgggctttagtttggatgtattgctcagtaatcttgttagctggttcagaaaacttaagggaccaactgatgttttttctatctctcttctatgcccaagagatgcattattaatgccccatcttccttgaaaggcataattgagttccataagatctgtttggctaaattcctaaaggactgagttgtaatttttttttagcctgaagagattttatttgtgacacctcaattgacacaagaaaatgcaaataaatgacagttttgataattagtttatattttaaaatgtattagaagtatgaatgatatgttggaaagagtaagagtgtggctttggaatcagatgtcaattagaaaccctatgtcactactcgctatagctgggatcctaggcaactataatcctgagctgtctattaagtggggatgatacaatatgcttcacaaggttgggaggctttggtgagataatgaatctgaaataatgaggtggaatacctggcacattagtgagtgctcaataaccattaattgctttttgccttatttgctggggaagcttgctattttaaagaatcctattaagaaataagaatcttttgttgaagtagatatccccaatttatcttctgtgtaaaacttaattttcaagtttacttaaagtatggcgcttctgaattgcatagaaaatgactcttatctgctaaaaagatttttagtaaaaatgtaacataatgaagtgggggaaaagatattggctgattcacagtttttattctttggagaaattcagcggcagccattaaatctgcttcatttaggagctgctcataaacgggaaataaggtagacaaaggacaagggaacattctggaaaaaaaacccgttttgtgcccctttcccaccaatatataccgtatacttgaaaaccagcatttttatgagcatagccttattttggaaagcaatctgtacatccttgaaagcgaaattgaccaaaactcatataatgatggattagtttctcctcttaaagcttatgctatatgtgtttttcttgatgtaaaaatatactagttggaaagaaacagcctaaatagtagaaataggctgtgtcttatatttataatgccaggtgaggacacatgttttaaaaatatttcatcccatgttcatgggaaagctggcactaagcttaaaaagatctctgcatactcattgtgtttattgggaaatctcataatgaaaatatttacttagtaatttcatttctattttgaactttatacactatatatacttattacagatgagcacttaaaggatgtggctgaattttaaagtgaatttttaattgtggaggtttttttttccccttatgctcattgtagtttattttctacagtttatggtttagctggtagattgtgtatcatattggcaagtgatcattgaacttcttaaaaataagtatttccaaactatctgaatacaccgcttgtacagctttattatcctcatgagagagccttaaatatttggtcacttgcccctaattttggctacagagctggaagatgtgcccagttttaaacatataaagtcttatgcatctcagaatataactattacatttgatttaagattctaacatctgagaaaagagtaattatgagatggaaggtcaaaaaaatcaaacaatgcaaaagcagcaaaaatagccttgttaactggagttgtcaataacaagtatttagaatattgtcagatacaaaagtgtatgtaatatagtgaaaacactaaaactttgaaatctcaggaatttaaaaagtagaatataccattcttgatttaatatgtgcccatggttttcttaattcttgtaggaaactaggtatgtggaaaggcttgagcaaagttattttaagtcaaaaacttttcagtcctgaatttcaatcctgaaatgtttctttggtgctaaattgtccactgtagaaaaaatatataaaaacatttaattttttataaaatcctattcctacaggataaaagggaaattgaagcatcgctgactcttggattgaccatgaggggaatacagatttttcaggttggtaaatgagaattgtgtcaaatgctgtcagccatgtcttctgtttacagcatgcctctgtggtcctgccacaggttcagtagttcatttttggccactggctggtcatcatttcccatttgtctagcacagatgtggatgatgtaggatggatgaagtgactcagcctgattgttgacagtaataagaaataacagaaaacaataagtaataagaaataacagaaaacaataagtcaaagattagcccaggttcatcactaacaggtcactaacagatcattaatatccaaacgtttctgtgtgtcagtgattttaaatattcttttatcctttggagcatttgtaagtggaaagaaaaacaacattttaatattgtgcctgaccagacgttttaatttccgttatactttagtgatgaaacttaccccttaaataagtagaaactgtcaccttttagcaggtgagacagtgttatcctgcagccatcaaaaagggagacagatacctctttcagcaagacacaggaaagtgaaaggatgtcttatctttgatgtaggcaaaatatccagttatgaaagtctgagcgccttattgcatctcttgaatacctgagtcctttggactttttatttaaatttaggcatacaccagaagggaaaagattgccttaaaagggttagttaatacagtcacacaggaaccaaaagccacagaattgttatcatgaatcttttaattattgtctgtatttctccaaagagatgtgggggcttttttcagattttaattactgtattttggttttcagggaaagaagttagagccattttacagtatctatcatttttcccattaactccatatgcatattcttttcacagaatttagatgaagagaaacaattactttatgatttcccctggacaaatgttggaaaattggtgtttgtggtaagtttaaaataactggcttaaaagaaaagtctcattaattgcttacttttttgggtttctgttattttttgttttgtttttaaacaatattgtctcaggcacaaaagctgttatttttaagaagttgacactgaagataatttgctttcttgtattctaatgcatgtgctatagattctttgtcacacatatcagtagtgaacttaaaatcaaagaatcttacagtaaagactcttatagcaaaagaagttagtaattttaatttatgtttggtccgtagcacatgaccctaagttattctagttgcagaaggtatttcgcgtagaggttagccagttcttttgaaagttacctctcttgagcaaagaataaagaattatataaaaagatgtttctattaatatttgactatttaaaacccattattttaaagagaggtctgcagttcttaacatgaaaaatactcttacaatattgagaatgatacattttcttttgttagagcaacgtcttgatttttcccaagtatttctcttttgccagctatatccgttttttggtagggttcaaagaattatagttaataatgtgtacatttggtcataaaaattcatagttctggccgggcacagtggctcactcctataatcccagccactttgggaggccaaggtgagcagatcacctgaggtcaggagttcgagaccagtctggccaacatggtgaaatcctgtctctactaaaaatacaaaaattagttgggcatagtggtgggcacctgtaatcccagctactcaggaggctgaggcatgggaatctcttgaacccgagaggcgatggttgccatgagccaagaccgcaccattgcactccagcctaggtaacaagagtgcaactccatctcaaaaaaaaaaaaaaaaaaatcgtagttctgctttgttcagaaattactgaaaaaaatacatgaggaaaggaagataaggatttgtagacatgggcttctctcctgtaagaaagatggcctatgtaaataaagggccatttctcctgctgggatatatagctccatgaggctatattgcaaatagaatgtgggcattgactccatgctgccctgtaagtcaaaagatgtgtttctgacttcacattactttaattacttgggcacgattcaatctgatttcactttacttatacattacatggggcctaacctgtctcctcctaactggctcttttttgtttcaagctatttgtgaaaggatctgagctgtttgaaaatgagcaaattatgacgcacttgcccctttcatgccccaaattaagttataataaagtacatttatgaaattgagggttttttagggtcctggacttgttgcttgctgaatctgtttgtgtattgcccttatctgaggagtcttctttaaagatacatatttttgggcctcatgctcctcctccaggagatttttgactcagtgggtctggagtagagatgaggaatctattttgacaagtttctcagatgatgcttcttgaagccaactcagctctgcctagctgtatgaccttgagcaagttacataaactctgtgccttggtttcattctaaaatgtagataattaactccctccctagacttgctttgaggattaaatgagtggatacatgcttagtgctcaataaatgtcagttgttactatttcagtattggggtccactggtagttcctttaaaatgagggaaatctcagagatttaaaaaaaaaacacctccaccttatccctgcctgggctatacaagcccatactgctccatacagaccttaaggtgtgtagttagaatatgtctccgttcttgctttacctccactctctggctgagaatcattatatctgaaatactcctttttgtatttcggctgccctattcattattaggaaagttaaaagagttcataatatcccataactgtaagaaactttgtcaaagccttgccctcaacttaggactttatcttagtgatcagatttgaagaatgagactccttatatgtctactgatagctgttcttgttctttcccatctcatacctccaactaccagctctctctatgtttagctagggaagttttccatttcttctaaaccccaaatagatatcctgtattgttcactatataactccttatttatttccaataatttatcataaacttattattttgtgtgtttctttgccatttctcctgctgggatatatagctccatgagggtaggaaccttgtctgtcgtattcactgcctatttttttttcagtgcctagcaaggtgtttggtacattttaagtgttcaataaatattttagaattggtaaataatttagaatcttttagaattggttgccttgttgctgagttagggtgttgggattatatttgatggttcttttatgatggacccttctcttctgcattatacaaataacctgaccagccagagaaaccaaagatattcctcagctgttttggatagtcagtgtttactgacagacccttgtggctagatgctttcctgaatttctggtcatcccctgtcctgtgacatttttgaaaggaaaaacaataatttatcccacaaggaattttaaatgaaactttatacatttcagaatctataattttccttactaaataggaaacaaaggggactttggcaaatcagagatttttcttcctgaatttgattcatggtttccttccaaagggtaagaaatttgagattttgccagatggcttgccttctgcccggaagctcatatactacacggggtgccccatgcgctccagacacctcctgcaacttctgagcaacagccaccgcctctatatgaatctgcagcctgtcctgcgccatatccggaagctggaggaaaacgaaggtattgcagggtctggggtgtggaagcaaattgtacctttgccacctgtggcctcttactctgaatgggggttttgagctcctacagaattggattttgggactgggacactccagattgagagcagcattactatttacatctcagtatttccagaaggcaaagggttaggcttgagccccacctactgtagcacttattcagaatatctgaggtgactgcatttagctatctctcaagtacagtctctaaggttttcccatgcctgacttgaaaatacttgcaaaaagccacccataaaggcacagggcaagggtttatctgcaactcagattttatctgcattttagagctttgtatttacactgacccaccttagtgctattatccacaggtggtctggaattctttccaatgtgattatttcttagggttagagtgacaataaaggtaggtcacagatgtgtctgcagcctctgattgacggctgggaggcccccaagtctgttctagcaagagtgccaaacaaaggagagggaagtcagctggtcctgtggggcctttgctgagatgcagatgaaataaagcagtctgtctggggcctcagagtactggaccctgaaacggggatcatgtcagggtgggaaagaaggcagtgctaagggtctgtaacatccgacttcaactttacattaatctgatagccctttatcttgagttgtggcaccctggatttcctccatttaacacaccccaaccctaatcctcaaaactgctacattacgtatttgggtttgtttttttttttaatgctttggggttttgtttatgctttcaaagatttgttttgcaaaaattagttttataaattcatgttgtagtaatatctaacagtaatttgattagattggatttggtgtatttgtgtgaatatcagggtgaagattcatattttaggttcatgtctgagacaagttttgacacctcagacctcatctttcctttagaaaccaggcaaatacccatcctttcttaaacaaacaaaagaccttgtagaggtttgtgcttctgatagatttctctcaaaaattctctgtcaatccaaatgagacccggtttggcaattcttttgtaatttcgtagcgattagaacatgaatcattcctcactgtctgccacaaactgcctgtgtcttcagagagaattggtataactgtcaggtgtattggcttcagctgctgctagactgccacttcttccccacgatgactcatcagtgtaacaaatatatctctcctatgctgacatgaatatgaaaaggaattcagatggggacaggaggaggatgaagaagcaggagaacctgtgagaataggtgacataattacgtgcagagcccataatttgccaagtcagcttcattcctaaacgtctaacatggcaccttgagaagttgatttgttctatcagctttctgcctgcagcattttagtacattttttttgttcagatgaccttaagagatcccttcagagccttaaagaattaatgaccttcctctataggttctaaggtaaaaattgcaaagaattttgagttttcagagagacagggcgttgttcattgccaaccatagtaccaagtgtattcggaggcttaagtgagtaggtgtctttgtttgttttgtgctgctgtaacaaaagaccacagactaggtaagttctaaagaacagaactttatttcctcacagttctagaggctgggaagtccgggattgaggggccagcatctaccaagggccttcttgttacttcatcccatgatggaaggtggaagggtaaagagagggtgagaaagagtaaaagggggccaaactccgcctctcataatgaacccactactgcaataatggcactaacccattcatgaaagcagagctctcatgatctaatcatctctttaaactcccatgtcttactactatgatatttgatatcatatgatttatgatagcaattagatttcaacctgagtttaggagggaacagacattcaaaccatagcagtagaggaatgaagaaatgacacatgcttagtttcttctacttaggggttttccaggtctgaaaaaggcctgaaattaagtttctctgggtcaactttggcctgaatccaagatctcacccccatttaagggctttatcattttaacatgaaaagcccttttttgggcattagtttagcaaaaaacagcataaaaagagtctgtgtttttcttaattttatgtagagtcaccttgtctaaaacactattttagcattttagtagaaaatgatcacaaggatttttccatagggtttagaagagaaacaaaaacatgccttgcgtcatttaaaaaaatgttaaagcctaactttattcaacagctggagcttattcctaggataagtattcacatttactgcattattttccaaagtagcgtatgaaaaacctcattgtctctgggcttttacaacagagggagtaaaaagagcacaggcatgttgatgatctgcactgttgacaccagtgattattagggggatgagaggttgcattttacatttcttagaaaacatttcagaattatttaatgtttctctcagtttgtaactgaacggtgtgaagcttcctaaatgtctggaaagggtctggtacagcactagggagggaagagaagccagccatgtggaacacccaggccatgctaacatgttgacaggaataggtagaaaacaggctggcaagtacttgtcttctcgtgagcatactagtgaatatagaggaactatagtgatctctgaacctatcaggaagttgagagtaaaaaggctatatgtaaagatacagaaaagcttttaaattattaggtccacagttcctaattattttagaacaatggaactccaacaacttagagacttttacttttttctcttcacttgccactcatccaagggccacatggctattgctgtgaaaccacagtgaataaaaactacagtaatttttgcaaactgctttagctgtccaccttcatctcacacctgctgattcagaagatggggattgttaggccccagtctgctccctgacaagttgtacatggatgcatttttgttgtgatgatatgtgcgtggagctctggtgtctggtttcagcctgctttctctgtagcaacacatactcacctttgtgtttcagccagttccttagaacaatgtgaataggctggaacctggaaatgtgcacatagccttctccaagcattttttttttgcattttgcatcctagaaggcgcatcttttctttctcctcctgctcattttctctctagggaccctgtgatgattatacttccgagctggattcagacatcaggcatgcaagtattttcacttaaccaagaaacaagacaattaaaatccattaacaggcccctgagaacccaattagtctactagtttctaaaatcagatcaacttcacattccccaaatgcactctccatttttaacattgttttattgtattatttctcaccagtattaaaaaggcaaggaatctaaacttcttccttgttttacatttctgacctgaaagacaagaataatatttttgtgtcagttgagttgtaactggcagctgggttgtaactttgtgccttaatggaatggttagtttatatgtaataaaagagactttgcagtgttgtgtgtttgactgcgttaaagaacagcactgacatgtgaaatcaaagaacagctttaccagtcagagttggaaatcatcaaaccagtagtgattactggtattttctaagtagatgataaagcctcactaattcagcctaagtggagaaaatcaatcttatattaatgaaaatccaaattttagaatattcacaagaaattctcagaagaatagttttattttaaattgtattcagcagctagagctaagctaacagtggaacaaattgaacaaatgaacaaataaaatgaatggcaattagcataattgtatttattaagtagtcttctagagcagtgcttctgaaattatctgcagaaaagggccagatttttaaaatatttaatatgctatggatactttcgcaaaatacaaaatcacattggtggctgtcatggcaatgtcacatagctctggaagtttctaaatgttcatatcactcactgaatttatttcactatggaccaataaatttgcagacaagaagtggtctgtaactgcactttaaataccactcttcttatactgcttgaagctttcaaaaaactaagtagtttaaatatccccctcaaatctgttgcactggtttttattcatttttcagtcttctgaagtcaaattcctatctaaattattactactttccaatcactagattctgaatttgaagttatccttgttcttggcctgatgagtcacttaagctcaccagccgttccttctgtcttggttaatgaactgtgttccccaccacgtagagaagaagcagtaccgggaatcttacatcagtgacaacctggacctcgacatggaccagctggaaaaacggtcgcgggccagcgggagcagtgcgggcagcatgaaacacaagcgcctgtcccgtcattccaccgccagccacagcagttcccacacctcgggcattgaggcagacaccaagccccgggacacggggccagaagacagctactccagcagtgccatccaccgcaagctgaaaacctgcagctcaatgaccagtcatggcagctcccacacctcaggggtggagagtggcggcaaagaccggctggaagaggacttacaggacgatggtaacagtactgtcccctcactggctctctgtttagtctcccagttttttcaagcattggttctatagaactggtgtctggagagcaactttaggcagtagtaataaagtggaagaggtgtcttgttgtcttccccaatgacttggttgagttgcttgtgtttggctgtgaacaaaacatccctctagttgtgatcctttgcggccacaagactggatggttgtagactcagtcttagctgtttctatgaagtagattggaaattagtcctgctgcccttgtgtctgtatttctgcttcccagattaaataaaacagtggttaggacagcacagtggagtgcagtaatagtgacagaaacatcttgaacttctggacccctccccacaaagtaaagattggagtccatgccattgagttacttagtaatgtttttctgaagcgcctcccatgtaaccagaactatagggaggataaaagaaatatagcacctggttgataggaacttactgcatgttaaggagataagatgaatcctatggcttatcttagccaaacttaacatttgtgtccctcttttatattatttttctgtctcaaataagtgctgtagcattcaggcttgacggaaaagatagactttgttaaagaaaagtgcagaccatctttttggtttctgtagaatttgtgtggctctcaagtcactcagtgcccttcagaataggcagctatggacatggggggctttgtgaactgtcatctgcctgtgtcagtgagccttgctttggtatcaggcaaagggcccatcagtttcggtttgtcctttgtcattgcagcaaggtggtatagtttttcttcttaaaaaatacagaataatgggcaaattatagtattaaaacacatataggtaatgcagcaatccgataagaaagaacaagtaggccaggcatggtggctcacacttgtaatcctggcactttgggaggccaaggcaggcggatcacgaggtcaagagatcaaggccattctggccaacatgatgaaacctcatctctgctaaaaatacaaaaattggatgggcgtagtggcgcgcgtcttcagtcccagctactcgggaggctgaggcaggagaatcgcttgaacccaggaggcggaggttgcagtgagcggagatcacaccactccagcctggtgacagagtgagacttcgtctcaaaaagaaagaaattgagaaagaaagagagggagggagggagggaaggaaggaaggaaggaacaagtagtacctgttgaaaatggtcccaggaaggaaggaaggaaggaaggaagggagggaggaagggagggaggaaggaagggaggaaggaaggagggaaggagggaaggagtaaacaagtagtacctgttgaaaatggtccctggagtttcctattggagtctcattagcaaatttattttcaaataggaataattacatagccaccctcaaaatatggttgcatattatgatggtcatttccctttttgtcattaactatcttttccttcttctgtgtcagaaatagagatgttggttgatgacccccgggatctggagcagatgaatgaagagtctctggaagtcagcccagacatgtgcatctacatcacagaggacatgctcatgtcgcggaagctgaatggacactctggtgagctcttacgggaagttattcttccttggtagcaggttatccaggactgaaaaacacatgcctcagaaaatagaaggggtgagctgggggccctagaccagagactggactgcactaagagtctcttcaggtcagtgttgtaaactgcaggatcctgtgccttctgtggaaggcagggaagaggagaaacacccaggactgggaattagcattttgtgctccatgctttggacaaaaggtagttgaacagtagggttctctttatgttatgctgtgtcgagaatcatataatgtatctggaaggccttgtagaccccttcagtctggcctcctttttacagataagttaacctatagttcaaagaggacaaatccaacatggctagaaacagaagtaggcctccaggtttttggggtttttttgttttttgtttttcccactgtgttatactggtagaggagtctgggaggaaaagtgtcaaaatgggttgacctaaaaagacactcttaaattccatattcgtatgaattcctgtagaaaacatgcattccctatagttatataatacatcatatatatttctgttacatgtaagatactatctttaaaaaacggcagcagtatcagttttgtttatagacatcagtcagatctaactgcttttgtcacacatcatgaatcagtctgttctttagagaaatatgcctcaggaaccagcactattgaaatggccccttccagctttgattgaatgaagggcctgactgaggtagcctgtccctgctctggcaaatccacagctcctgatgttcatcgagcctcctcctccaggtgccaggcactggaaatcagagaggaaccagaccgatacacagtcactaccatcctggcacttagtcttcaagagcaggaggcatcttttatttcagaattctgttcgctaacccaacagaaccctggcttcccagacctgcctgtagctgcagggaatcatctctctgaccaacactgactcattaggctgcttaccctaaacatgcttagagttcatataccaaactttgcccctttttgcccatgtactttatgatattgaattttctcctataattacattttaatttaaattcacaattatatgcacattataggtccatgtatatagctctgtgtgtttatgcttgtggaaaggaaatggtctaaaaactgtgtatgccgcagtgcctttgggaagggaggtatgagggaagctgacctggactttgcgtttatatatttctgcatttaatttttataagactgttaattttaaatagaaataaaatttaagtaaaaagcctggctgtttaagaagatttatatataaaaaaagtttgttgaaatgttataaaaataattaaagaatgagtggtaaggccaggtgtggtggctcacacgtataatcccagcactttgggaggccaaggtgggtggatcacctgaggtcaggagttggagatcagcctggccaacgtggtgaaaccccatctctactaaaatgcaaaaaaaaaaaattagctgcaggcctgtaatcccagctacatgggtggctggggcaggagaatcgcttgaacccaggaggcagaggttgcagtgacccaagattgtgtcactgtactccatcctgggcaaaagagtgagactctgtcaaaaaaaaaaaaaagaaaaagaacaagtggttaaattataccttattcatacaatggtatataaccattaaattcgagattttcaaacaatatttaataacataagaaggatagttaaggtaaatagtaaaaattatataaaatgtcatctaattaaaaacaagaatatttatttgtgtattttaaaaacgtaaaactattaatagccttttatttggatgttagggttatagatatagatgattttattttctttcttacatcatcttagttttctaaattctctattaatttgagcatttaaacgttgcttataaaacattcagctaagtactcgccttggcagcacatacactaaagttgcagtgatacagagaagattagcatggcccctgggcaaggatgacatgcaaatttgtgaagtgttccatatctttaaaaaaaaaaaaaacactcagctaagattgagtagtgatgaagtataccacactgtctttcattcttacagagtttgataggagttggttaagtgttttgagcatcagctcggtgttgacttttccagtggtgggtctgagtttggagaatactctttacaggcatgatagctgagggcacatttaccaggaaatcgaaaaggaaccatgacaacttgtttaaaggtttaatgctctttagaagataaagatcgttctagatcctctactaaagccatttgtactaactcctaaaacatgagtatcccctgagtttttaaagtgtctacttgtaaaccagtaatgtcttcatatttcatgtttcaattgaactaattattgaatacttaatatgtttatggcatatgctagacactgagtcattatgagatgtttctaaagagttaagggatagaacacaagtcattctgtagactactagcagtagttgaataagaatcacattacttaaagggttttttgttttttttttttaagaagccatttggccttatggatctagggcttgacctgtagtacacttgcttcatccattggcaagaaaaatttcagcggtgttcacttacacctctagttcttattggtaattttaccttctgagacatgtttctactcagtgcttcactcatatgccagtcacatagggaaatgtcagccctggatttctgcttctgaaattttggcgggtttccaccgagtgctaaagtgcttaggttaggtgctctgttgttctcaaagacccagtactgaattttcactgtggcctcccagtttgtctcctcccagggggatctgctgcaggaggtatgtgccaagtgtcccatcacccaaaaagagctgctgtgaactgagtgtatccatgtatagtccctgtacctcacccttttatgcattcactgtgtaattattaaaactagcaggcaggtgctgttattggcccgattttatacgagaaggagactgagacactgggaggctaagtaactggccaggacacatggctaattagttatctgggccaggatccagccagatctatctgacttcagaggccagagcccccacaattcaccactatacatccaagccgaaccaaatctagaaggcatgtgttcagtaagggttaagtttaatgttgctgctgaatagaaaggggaagaggggaagctttatgagatgcagtaaagaggctgctttatacctatagtctttgcttcttttctataacttcatcataaatagcttaattagaagtttgttttagaaaattcagactaaacatcttcttacactctaaccctactttgactcattaacctctatttactgtaagatgagagagagtgtgtgtgctgttctggttgtctgccaccaaagagtcacagtgaaactttttggtaatggttaatatttgatttttcattcctgatagcaatatgtcagaatatatggcaagaggtgtgaataatttgaagtatttattgtttttatctctgtgttttatttcagggttgattgtgaaagaaattgggtcttccacctcgagctcttcagaaacagttgttaagcttcgtggccagagtactgattctcttccacaggtattaaaggaattgaaaaatatcagttaggaaactgaagttatagaaaattttaagtagtaacttacatttatacaaatgagcaaaaattaaaaaccctaaggaaatgatccttcctagatacgtacattctagctttattctgaatttatttccatcttatttgctagttctgcttatctttgagttgatttttacttagataagttatagattttgcttcacattttatatggttgggaagcctctgttcttcaggcttcaggcgaaccacgtgtgcacatgcatgtgtctgtgtgtgttgcttgtcctcaacctgggagaataatattttttgtcagtgtgttctggcagaaatgtttccacactctggttattccattcagattgaattttcaaagtatgctgagcctagagcatttgacaacctgtgatcattggttaaactattaaatgtccagcaatatagataaaatactctgaaactcatggtttcagcatttggatgtaatgtatgactaatggccctaattcctgagcacttcctccctcctcctgcctttctttcttgggctctctttgtgtcttgtttttttcccttctgtgtgtgtttctcttttttcatttgcattctggctctccttgtccctacttttctcttcctctttcctcccttttttctcatttgtcttttctttctcttacttgcgttgaagtaaccataatgtgaaaatgatgtttatgaaatattttcctgaaaactgcaatgagtaatctactcttaagagatgtttctggggcacagctgatagtcagattccacacctacactatggggagaactttgtgtgccttccttgagagtttgtggggatgaccaaatgattctatgtgtgaaatcctgttggagtctgggaagacagcatcagcacaagggatcactcggatgtgacacttcctagtaaaacatgcttctggaacttttgcctctagcaaaaattgtatcttattctaacagggttgtcctttgtggtgggaagcagcaaaatttaaagatataatacctggtttccttaaataacccattgcatatcttccattcatataattatcagaatcatttttaacctatttctaataccacctcttgggataataaaaaaaagtctgccccctgctgtgtacagcatttggcggaacccccccacccccgactcgtgttcgggaacttagtcctggtgcctgcctcccagcctcttcaacaccaagaacaccctatatcctacccagcaccaagaacactttatattcaacccaagaattctggccttttaaagagaaaaactgtgtttcttggtaataattggtttattttcctatttcttaataaaataataacagaccttggcctaaaaggtctgaattgccatatcctactgaaaaaaaaaaaggaagccatgtctttacctatatgaccttatttcaagataattacttgatttctgaaatgctagggatagttggattcctgttgtatttgcacctctgtgctttggattatttgtaaaatgaggagaatgatagtgcctgcttcctaggactgttaggaagattaaatgagttaatgcatgccgagtatttaggtcagggcctggcacatagtaattgctcggtaaatgttagctgctattattactgatggaggtggtgttgatgatatatttccccatacagcccagaaaccacagattggaaaccactttctaacatgtaaggattacttaaccttttgtggttctgtagcatctctctttacaaggcaaatattctaacctttcactttaaagttgtttcatccttcccttatcttgcagactatatgtcggaaaccaaagacctccactgatcgacacagcttgagcctcgatgacatcagactttaccagaaagacttcctgcgcattgcaggtctgtgtcaggacactgctcagagttacacctttggatgtggccatgaactggatgaggaaggcctctattgcaacagttgcttggcccagcagtgcatcaacatccaagatgcttttccagtcaaaagaaccagcaaatacttttctctggatctcactcatgatgaagttccagagtttgttgtgtaaagtccgtctgtgtgcagctgtacaggcagcttactgtttgctagaggatgcgaaagtcataagttctttacatattacttgtgccatatcttcttcaccctaaacatagctctttctttataatatttgtgatgatggaaacaaaagccttggaacaattgcactttaagtattacacagaagtaaaagaactacagaaaatgtacagcaagacaagtgcccggaagttcactgatccttcagaaggaaatgcgctttactgattgcaaagccttcagaatattggagtgtggtgtgtttgctcatctgatgctttttagttcagttacatgtaacatcacatttttttatcacgtgaaagatgttagatttgtttgcttataaattttttaccactcccacataaaatgctcatagtttgggagaggaaagagggaagattctctcttcttttaacagagagatgattgctctgtatacccattgcttcctccctgaggctgtcccaaagtgaacactgatggagtggtcaaaatcataaggttgtagcaagccaaagatacgtatgtgacagaagcacataagcaataagcagaaaaccagaagtgcatgctgtgatgcctgtgactccttcatcccgctcagtgccatgtcctcttttgtgatcttccagaaagctccaggattcatttgagttccacatccaagtaacagatgaattatattcatgttgtaatgcattttgtggagtttacaaaaccagtgtctgttaaaactttggaaaatgtcttagaaaacgttggtgcttggtgatgctttatttgtttaattatcaagaacaaattatggcaatgctagtttctgcttaaccaaaatactctgtgtatatattatacatatataaatacatgggattgtgtatgtctatatgtgtttaaagcttactatgtcttcattttggcttccatgactatcttttatacatggaattccttaagattgagaatatgtcactgagtgaatgatacctgcagacagtcagttgatatatgtagagttcagaatgactgttttctcatgtgcctttggccatgattctcaacactgattgtataacagaattttggggggagcttttaaaaaataatgactgagtctcccaccagaccgattacatcattctcttgtggcgggacccaagtagaattgccttttcttttaaagttctccagatggagctaatatgcaacaaagttgaaaaccactgatcctgggggtgtcttgttaattttgaagtaaaagtgtacagaagacgtagtgtatgagaaagggccatttttaagacagttacctgttgtgctgctgttacaatatataatgaaaccaagtcaggggagtgaatttatcaatcttttgatgtaaagtaaaaacgtagttcacacttcaggagagaacttcatagcacaatgtctttctataagatatttttaatgatttagtattttacaacatttgtttaccatattttgatataccatttttttctatctgcccagttttattaaaaaaactatatattattttctaaagaaacaatcatatttttatacaaaattatgttttcaggtaacgaaatagatgtagggtacagtggaacataagcagtgttacccctggctgggagtcagtattatacaacaaatggtgagctggaacatgccctgtctgtgctgtccctcctgtgctgggtcgcggatgtgtaggcaacattgccttatcacgctaggttcacctgacactttaaaaggaaaaaaagttccatagagttctgtggtcacaaaattgttttgcttttatcaaatactttaatagaaccaaagttgcagatattggaatgtatggaagtatctcagtctctgcataagaggattaaagtatgaaaggatcatttaatgactgttttacttataagtcattaagtaatccaccatttcttatggatgatgcttaagcctggtgaggtttgtactctaaggagcccagatcataatgcagtgcatttccttagcccttagagtttcttgcaaacatttaaaaaaagacatatttaagaaagaaagataaagaaaaaacatatttaattactgtaaacaggtactgctttatgtttattttctctctacttcaaccaaaatcagatctttgaggttttgctgacattgttggtggttttgcacatgttctttctaattggatttatgaatagttctatgggttttcaaagatgaatcatgctaagaacacttctgctttttgatccactgtttgcagcagaattatatatatgtataggaaaaatccactttgaataatccatgttttgtatttggaaattgtttttaaaaataaaaaggaaaggaaatatataaagctgttatttattctgcatttcttacatatctatcgcttgtcagtatacccgttttggtatatattgcctctgcacatctacatttgtatatgcaacagtgagctttatatctacataaactgtaaataatcctttctgtgaaaggatcatcatatcaagatgataccaaaagtatgtaaaaagaaacctgcattattttgtaattatttcttatagatatttcatggtaagattagcagtcaataaagttacttttttgcctttaaa

SEQ ID NO: 21 - DNA, 12433 bp, Homo sapiens
aaactgggtgacagagtcagaaaactccccagctaaacacccgtaagacttcatacaacacaatactctatactgtgatgatcacagctgccaaggtaagaaacagatttcgctgactttggtaattcttactttctataattcttaattcctataatttctataatctgaacttttaaaatgagttaattttatgaatatcagttcaatcttaggcaataaaatgacatgacaaagtgcttaaatttataaatgcttatccatttagtgacaggaaaaatgagacaactttgaaatgaaaaaggtcatattcatctttgatcctggttactggtttgtcatttaaatttatctttcacttttattttgcttttcaaatgtgaatttctgccaattaaaaaatcttccaattatgttaccatatttggtagtagtggttaatttctccatgcaaaaacaatgacttaattttgttatttattgctctgctgagaaacagtgcagaactgagctatttacatctgaactaatatgaatagtcatttgactacaacatgcacattatcagcatgcctattccaatattatcataatttcatacagtgaataatgaaatggagtttcagaatatataatacaagctacttttaaagtgcccttgaggatgtttcccctctaaagtccagtcaacttttaacaaacatttctaaaaaaattccatgctattaataaattgagttactgatattaaattcaatattgtatcataaagaagtttagaaattttaaaacaatgttcacaaacacaaaaaatctgacgttagagaataatttgatactttaaaaagttattttgacacacgaatattcttaactatcttattttcacacaaatttgattaaatggatttctgcctattaatgcctatagttttgtcaagttattatcctccagtggtactccatttcctctctcggatttagaaagaaaggaaaaaataaaataaatgccaggaatggagatgccacaatcaattttatgacttctgtttgaattctaccctattctttatgttacaatcctcaatttagtaaatgaaacgtttcctcattcttagatctctgtcagggcatacagaaaattacatatattttatttattttgattttcatatttcatatatatgttaaaataaaatttatctctaaaattctcaattcctatgacaaatgttaattctattgctcactacaaataagaactttgtaactctgtaagcagctttccttaagacataaaaaaacataatttttgtctaccactgaggtatcctaattgtgtctccatatctctatactcatatttttcctttgatagtacataaaagtcattcagtgtaggtgtcttatgttatttgtgcatttttattcaaatatctatcaaattacattctcacacttcaaattgggtgttcacgagttattttattgtatcagaattttgctatatcacatattactctaaaaagtacacatacttctggatagagcagaaattatattaaacttacccttagctcactagtatgtctcagttaacagaaattacagttacagagactgctaaaatttcaaatataatgtggtagtaccatacattgtgtcccaactagttcatctataccttaaggtgcaagttaagtattatctttgtttatgaagacatgtggtttcaaagtaagtgctaaaaaaagtgttagatgaaatcaaatggaaaaaatatgaaagatgtttaaattaagaagcattaagttttaaaaacgcatgaaagagccagagtacttgctttactaaaaggcgtgacagcactatcatttcctaaaactcaaatatcaaatccattttatttgtattttagtaggcataaaggaaaatgatcacatttgggtatataatcatatctttaattagtgagattaagaaataataaaatattgcataaatacaatagtttcagaaaattttaatgtattttaatgttttaatgtactcattacacatgtacactaaattatgtaatatattaaatttttaattaaaaaacctaaagtctagttacctctccaaattagacaatatattaccaatcccagaaatgaggagggccaatgaacacttcttttttattcttaaagagcaatttcctaatatactcgtgtacacaaatatttcatttggtcctcttaattatatatttgatactgcatccctattctacaatttaggaaagatgcaaaaaggtgaactgctcaagatcacagaactaagaaaacagggaaaccttggcagaagtttaggttttgtcactaagccacatgcacatcctctatatactgatcagcatggcttaaagtaaaccatgacactgacaaacaaaatttgaaagcccccaaatactgtaaatgatattctaaaaggcaaaaggcaaattcagagaatacaaacttctattttaattaaaagccattccactccatttaaattcaatttatgcatagcattacattcttaatagtctaaattatattctactgatcattttcaaaaccagaaatatacgaaaattacagatgcccttagttattaagcaatacctcctggaaggcaaaattcaaactaactgcacagactttaaaaaaaataacacaccccaatcaatcaaagtttccttttatttgtttcattgctaaaatactcatgccttcaattcatctgatacctaaaatccaagttaacatctcctcaaaactttcacaaaaatcacatttcgatactttattctaggttccctagaatcaagtagtctctttgtacaatttcaaagttcttacccagagtaattctgaagcatgtgttaccaaataaacacatgaaaatgaagcctggatgtacagcatactcatagtcaactgaggacctctagtgcctttgaaaaggtactccatctttagttttcaacccccaacccccgcacaaaaaaaaaggttgactaactcactcacattaatagggggtatatttattaagtggcattcattttaaatccttaagactttctcaatactacctccccatattctcttcccccagaaaagattctgaatttccaactcctacagggttaagaagaatattttacttgtaaatacacttgtaaagcattgtttcaatatttaaaaaacaataatgaaggcaaacctacagacaatatagcaacagcaataagctaaattgtcagttttagagagaaaaatatctctgtgctgttgtttaatgaattctcctcaagacagagctttaacatgagaagcacttcattatgggtcaatttaggaatgagaatatattgatttttatgcatatacaattattttcataaccagacagaagcagcttgaagattctttcaaacagccagtctggaccaacaaagctctggaatgttgctaccacaaagtaacttcaaatagaatgtccaagtttagtattaggcaatctcaaaaggaaaatgactccactggagtgaacttttgtaagccaacagattcatcgtaaatctaatgatgaactgtcctaatttattaccacaagtccaaaaaagggtatatgcacattcacttatggcttatcagtggaaatgtcagaaagtagtagaaaaataaaattccaaacaatccaaatatagacaagtcctgtttattcaatctatagaaaattctaatcttctaaaccaattagatggaaaaaacatcctagagtatatcagactgtagccttagatattacttgaattcaatttaataaagtatttcttcagtactcccatgtttactaaaagaataaacaaaattaaaaggagaaaagcaaaattctaaattctacaaacataaagaatcccaggaatttattatttcagcaaaaggaataccaccaaaaatactgaagtttgagaagttctgcaagaagtgaacatacttaaagtatagatggagattaatgctcagcatatacaacatcattaaagtatcaattgtctagcaagtcataaagcaggccaccaaaagttttcagaagactattgaggttccttccgcacaagaatgcatctgatattacattgctaaaacaggactcactgcagacaaagtaaggactcctgaaggagttgatatatagtagcttccaccaaacatgttgcctaacatggtatatgacattagtcaaaagattagagttgcctaatggcttttctatttccttcttccacctcaaaaaaaaaaccagaataccatcttgaacttgattttttttttaatttccagcgttacttttcttgaggaaaggacgacaaccaaaggatttataaatcccacaaagaatagtaaagaattctttatttttattcttctcattcccctaaaaagtagagtaatcatggatccacagacataagatactctgtggatactttcctgcctctgacatgtaactcaagagacaggagtctggcatttctacacccaaactcctaacaagcacctttcatgttttcaatactcttgattctagggcctagaagacaatttgattttaaaattcatctataaatgaataccactcttgtgtcaaaacaaccaatttatatatattgtcattcttttaataaaagggtggagagcagcttcagtttccatggttgtttaggccatatacaagttcagaaaatcccaaaactatttatgattagactaacagaatgctctaaaaagatcagataacatgaaaataaaactaaactatttttgtatgctttccatcgaaaaagtactctattaaacagcttagctgttaagaaattaaaaaaaaaaaaaaaaaggaaactcatacagtggttgtcagtgcagagaagagaatgataaacatctgacaaccatgccataaattataatgtagtaaaggtcacagacaactccaaaaataggattctgctgttcccacaacaaaggttttcaattctcaatgtatgacaggaagccccatcttctatggataaaatctggcctaattatcatcatacaaatgttggtattcagtagaactaggattccacacatttcagatgataactgtaaaaaattgagcccaataaattaaatgtatatcattaacattttagcgtgtaaagcagatttaagtttaggcataaaatcataaagtagttacaaataactttaggattatggcatatttctaaatctgacaagaaacaggatactatttttggtcatctcctttacacccaatttgtttccagaaacaaactcttctttttcaataacagttagctgttgtaggattataagatcatctttaaagtatgttaactatgctttaaacagtaaagagctcatctctttagggcatatctctgtatttcacaaatactaaaaacccatttatacaaagcctagttcaggttaatactgtgttaatcaggtaaccattaatttaggtgaatcctctaagcctcatttttctcacctgtgatagaaagagacttgaggaaaatattagagcttacatgtccaactaacaaattgttattagaactagttaatctgtcaatcacagcattatttttaaaattgtttaacttattattaaaaatgagggccaggcatggtcattcacacttgtaatcccaggaattacctgagctcaggagtttgagaccagcctgtgcagcacagtgaaaccctgtccctaccaaaaatacaaaaattagccaggcatggtggcgcacacctgtggtctcagctactcaggaggctgaggcagggagatcgctagagcctgggaagttgaggtgcagtgagccacgattgcacaactgcactccagcctgggtgacagagcaagaccctgtcagtcattcattcatccattcataaaaacaattaattaattaaaaatgagatggggtctcattatgttgcccaagctggtctcgaactcctgggctcaaacattcgtcccgcctaggccttccaaagtgttggaattatagatgtgagccaccatgccctgcccacagcattatttttaattaacaattttctaatagttttagtcataaaaatcccttatttaactttagtgatttattgaagcataccaattatgcactaagtactaggatactaaataaacacacagtttctttacttcagaaactatcagtctagctggggatacaaacatgtaaattgaaattgtgctataatctgacagatatcctcatatagataacactaaagccctattaaaaaccagtagaggtgacaaccaattccaccttaataactaatgaaaggtttcactaggaagtgatatttaaactgaaccttaagaatcaactgaagcttgcatggcagacaatcaaaaggtggagaacacattccaggcagagatagaacaacatgtgcaaagaacaaaatcacaaaagggaatggagtatttatggaaaggtgacatgtttcatgtgactgaagtacaacttaccagtgtcaacgtaggggatgactcctgtatatgcttcatgataaactcctggccaactccctcctttcccatgttttgtctcaaaataatttttaaaatttctgaccttttaagaccacttaagcccaaaaacctcacaaaaccatatgttcaaataggaattaccaagtctaattattattcctttcttaactgtattctgctacacatcttcataaaaggtgactactcggccaggtgcagtggctcacgcctgcaatcccagcactttgggaggccgaggcgggtggatcacgaggtcgggagatcgagaccatcctggctaacatggtgaaaccccgtctctactaaaaacacaaaaaaattaggcatggtggcgggcacctgtagtcccagctactcgggaggctaaggcaggagaatggcgtgaacccgggaggtggagcttgcagtgagccgagatcgtgccactgcactccagcctgggcaacacagcaagactgtctcaaaaaaaaaaaaaaaaagtgactactcaaatataaataaaatcttcccataattttccaatccactagatctacaataagcaaatatcaacataagcaaatatcaacataagcaacttaaaggatgaatctcaataaagaacaaaagaaaatctatttatattttacctgaagaattcaaacaaaagtcattaaatatatgtcaagtttaagctgctatgtcccttatttttaacttttgttttaagtttgggggtatgtgtgaaggtttgttacacaggtaaacacatgtcatggggagcttgttgtatgtattacttcatcatcccgttattaagcccagtacccaacagttttctgctcctctgcctcctcccatcctccccgctcaagtagaccccagcgtctgttgtttccttctttgtgttcataagttcttatcatcttgctcccacctgtaagtgagaacctgtggtatttggttttcttttcctatgttagtttgctagggataatgacctccagctccatccatgttcccgcaaaagacatgatatcattcttttttatggctgcatagtattgcatggtgtatatgtaccacattttctttatccagtctgtcactgatgagcacttaggccggttcatgtctttgctattgtgaatagtgctgcaatgaatattcatgggtgtatgtctttacggcagaaagatttacactcctctggatatatacccagtaatgggattgttgggtcgaatggtagttctgcttttataagctgctattttctaagtagaagtgttatagacaacctaaataacagcctttagccacctgtttagacaatgaagaatatatgctagaaaaatacaggtagttaataactctttaaggaaagaaaatttgatagaagttgagtgtttggaactccttgctacagaccaatattatgaagggggacagagtctcaagccaaaaatgcccagtctactatataattcagaatataatagacccaagttgaacactacagaatctaaacaccataaaccatatggtttctttgccaaagtaaatgccgggttctaactagtcatgcctgatacttaccttcccctttgccattctttcagcacttccttctgctcccttcagcactttcctctctcaggaatgggctaacaggttgagatgggcttttatgggatgtataaaaggacttaggagaaaataaaatctgacacctggggtaaggtagtaatatgttgattaacaataatatatcaacaaatgttaacagtcactatgtctggcagttaattactgactttttttctccgtttttcatttttcttatttcaaaattgacacataagtatactgattgaaaacaaaatgtccccaagtgttaataacgattatctctggacagttaatacagttaattttcagtctatatataatttttctgtaatgacatgtaaattcttattttattaatcatcaaagtataggccccacaggcagcaatagcttgtgggatctctgaaagaaggcatgatggaaactactactattaagtagaagtctgtaaataggatatgtctgtggtagtgagataataataattactatgtgttccaagcttgacagtcttcagtacttaacatcaaatcttattaaaatgttacttaagataacattctataaaactataaaatcataaaaaggaataacaatttgaatctatatttttggtaaaacacttcccatttaacactattttattttagattaaaattaagatccagggaacaatttgttgtatgcatttcctttttatgagattggctctggagctattaatacagtgactgatcaaaccaattacatctacagagtaacagatttaaagaaactatatgttagaacttttacccaaaagaataacccaaaacaagctgtaccttaaaccaaatacagcaggtcctcaaataacatcatttctatgtcattttgttataacatttaagtatgtgtggggcttgcatattctccccacatctgtgggactctggtttcctcccatatcccaaaacagtgcacattaggttcactggcatgtttaagttgtcctgggttgagtgtgagtgtgtacatgagtgtatcctgtgatggagtggcctcctatccaaggtgggttcctccctccttgagctgctgggattggctccagccaccagcaccccaaaccagaataagagggttgaaaaatgaatgaatggatgaatacaaattattatcgaataaaaattggtaaagtctacggtgatcatacaaatgcatgacaataaacgctatggcacaaaagcactcagagatcccaccgtatttgaattgtttttgatctgcatggagctggatgtgctcctgacaattttcatttctcaaacatgattccatgtttttaatagaccaccacaaccactgttactcactgattcaccaaatactgggtaattatctttgttggcttttttttttttttcctgggacagagttttgctctgtcacccaggctggagtacagtggcatgatctgggctcaatgcaacccctgcctcctgggctccagcgatcctcccaagtagctaggattacaggcacatgccaccagcctagctaatttttatatttttagtagagacagggtttcaccatgttggccaggctggtctcaaactcctgacctcaggggaactgcccgccttggcctcccaaagtgctgggattacaggcatgagccactgcacctggcctatctggtttttattaatctttcttaaatgtatacatagttcatatttctctcaacgtttaatattagaagtgtttggggtctttattgagaagtttggtgatgtttttgtgaccagaaatatgctataggaacttaactcttgtttacatcaatcagcctagggtaaaaatggttttgttatatgttgttttgcgtaaagtcatggtttccaggaacttatggaagacactgaggattactccaatacttgtagtaaatttgggagaaaaaggcaaggactaaagttactactcctaacacaaatgagacggtcatggtgtgccccatcaaaaaaggagagaaagagagacagacacatagaaacacgtgcacatacacacacacacacacacacacacacacacacacagagagagagagagagagagagagagagggagagagactatagaaacatgatgttataaataacaatagtgctgaggaagatgaattagtgtaaaattgtattttttgttctgaggataggttacatagatgattctaatccatttattatttttacattccaggctacctaaaagaagacagttatctcatatttggctgccagctttttatctttctctcgaccacttaaaacttcagacttcctgtcctgctggtatcatggagaaagtccaatacctcactcgctcagctataagaagagcctcaaccattgaaatgcctcaacaagcacgtcaaaagctacagaatctatttatcaatttctgtctcatcttaatatgtctcttgctgatctgtatcatcgtgatgcttctctgaagttctgctacaacctctagatctgcagcttgccacatcagcttaaaatctgtcatcccatgcagacaggaaaacaatattgtataacagaccacttcctgagtagaagagtttctttgtgaaaaggtcaagattaagactaaaacttattgttaccatatgtattcatctgttggatcttgtaaacatgaaaagggctttattttcaaaaattaacttcaaaataagtgtataaaatgcaactgttgatttcctcaacatggctcacaaatttctatcccaaatcttttctgaagatgaagagtttagttttaaaactgcactgccaacaagttcacttcatatataaagcattatttttactcttttgaggtgaatataatttatattacaatgtaaaagcttctttaatactaagtatttttcaggtcttcaccaagtatcaaagtaataacacaaatgaagtgtcattattcaaaatagtccactgactcctcacatctgttatcttattataaagaactatttgtagtaactatcagaatctacattctaaaacagaaattgtattttttctatgccacattaacatcttttaaagttgatgagaatcaagtatggaaaagtaaggccatactcttacataataaaattccttttaagtaattttttcaaagaatcacagaattctagtacatgtaggtaaatcataaatctgttctaagacatatgatcaacagatgagaactggtggttaatatgtgacagtgagattagtcatatcactaatatactaacaacagaatctaatcttcatttaaggcactgtagtgaattatctgagctagagttacctagcttaccatactatatctttggaatcatgaaaccttaagacttcagaatgattttgcaggttgtcttccattccagcctaacatccaatgcaggcaaggaaaataaaagatttccagtgacagaaaaatatattatctcaagtattttttaaaaatatatgaattctctctccaaatattaactaattattagattatattttgaaatgaacttgttggcccatctattacatctacagctgacccttgaacatgggggttaggggagctgacaattcgtgggtccgcaaaatcttaactacctaatagcctactattgaccataaaccttactgataacataaacagtaaattaacacatattttgcgtgttatatgtattatacactatattcctacaataaagtaagctagagaaaatgttatttagaaaatcataagaaagagaaaatatatttactattcattaaatggaagtgggtcaacataaaagtcttcattctcattgtcttcacattgagtaggcagaggaggagaaagatggggaggaagagaaggcgttggtcttgcagtcttgtcttaggggtgtggggagtgggggaaagaatattcatgtataagtggacccttgcaattcaagcccttgttgttcaagggtcaactgtaataggatatagctatttttcttcctctatcaaccaaatggtaagcatctattttgcagtccactctactgagctaaattatagatccagctatgctatttataattattttcttgatgaataaattt

(The sequence listing continues in the following parts.)
